(19) United States
(12) Patent Application Publication
(10) Pub. No.: US 2010/0333234 A1
(43) Pub. Date: Dec. 30, 2010

(54) Transgenic Plants with Increased Stress Tolerance and Yield

(75) Inventors: Amber Shirley, Durham, NC (US); Damian Allen, Champaign, IL (US); Bryan D. McKersie, Research Triangle, NC (US); Nanfei Xu, Cary, NC (US); Piotr Puzio, Mariakerke (Gent) (BE); Richard Trethewey, Berlin (DE); Rodrigo Sarria-Millan, Durham, NC (US); Amy McCaskill, Apex, NC (US); Larissa Wilson, Cary, NC (US); Lalitree Darnielle, Durham, NC (US); Resham Kulkarni, Cary, NC (US)

Correspondence Address: CONNOLLY BOVE LODGE & HUTZ, LLP, P O BOX 2207, WILMINGTON, DE, 19899, US

(73) Assignee: BASF Plant Science GmbH, Ludwigshafen (DE)

(21) Appl. No.: 12/744,728

(22) PCT Filed: Nov. 27, 2008
(86) PCT No.: PCT/EP2008/066278

§ 371 Date: May 26, 2010

Related U.S. Application Data
(60) Provisional application No. 60/990,326, filed on Nov. 27, 2007.
(60) Provisional application No. 61/018,732, filed on Jan. 3, 2008.
(60) Provisional application No. 61/018,711, filed on Jan. 3, 2008.
(60) Provisional application No. 61/043,422, filed on Apr. 9, 2008.
(60) Provisional application No. 61/044,069, filed on Apr. 11, 2008.
(60) Provisional application No. 61/059,984, filed on Jun. 9, 2008.
(60) Provisional application No. 61/074,291, filed on Jun. 20, 2008.

(51) Int. Cl. A01H 1/00; A01H 5/00; C07H 21/04; C07K 14/00

(52) U.S. Cl. 800/290; 800/295; 536/23.6; 530/300; 800/278

(57) ABSTRACT

Polynucleotides are disclosed which are capable of enhancing a growth, yield under water-limited conditions, and/or increased tolerance to an environmental stress of a plant transformed to contain such polynucleotides. Also provided are methods of using such polynucleotides and transgenic plants and agricultural products, including seeds, containing such polynucleotides as transgenes.

[0001] This application claims priority benefit of the following U.S. provisional applications: U.S. Ser. No. 60/990,326, filed Nov. 27, 2007; U.S. Ser. No. 61/018,711, filed Jan. 3, 2008; U.S. Ser. No. 61/018,732, filed Jan. 3, 2008; U.S. Ser. No. 61/043,422, filed Apr. 9, 2008; U.S. Ser. No. 61/044,069, filed Apr. 11, 2008; U.S. Ser. No. 61/059,984, filed Jun. 9, 2008 and U.S. Ser. No. 61/074,291, filed Jun. 20, 2008, the entire contents of each of which being hereby incorporated by reference.

### FIELD OF THE INVENTION

[0002] This invention relates generally to transgenic plants which overexpress nucleic acid sequences encoding polypeptides capable of conferring increased stress tolerance and consequently, increased plant growth and crop yield, under normal or abiotic stress conditions. Additionally, the invention relates to novel isolated nucleic acid sequences encoding polypeptides that confer upon a plant increased tolerance under abiotic stress conditions, and/or increased plant growth and/or increased yield under normal or abiotic stress conditions.

[0003] In another embodiment, this invention relates to transgenic plants which overexpress isolated polynucleotides that encode polypeptides active in fatty acid and sterol metabolism, in specific plant tissues and organelles, thereby improving yield of said plants.

### BACKGROUND OF THE INVENTION

[0004] Abiotic environmental stresses, such as drought, salinity, heat, and cold, are major limiting factors of plant growth and crop yield. Crop yield is defined herein as the number of bushels of relevant agricultural product (such as grain, forage, or seed) harvested per acre. Crop losses and crop yield losses of major crops such as soybean, rice, maize (corn), cotton, and wheat caused by these stresses represent a significant economic and political factor and contribute to food shortages in many underdeveloped countries.

[0005] Water availability is an important aspect of the abiotic stresses and their effects on plant growth. Continuous exposure to drought conditions causes major alterations in the plant metabolism which ultimately lead to cell death and consequently to yield losses. Because high salt content in some soils results in less water being available for cell intake, high salt concentration has an effect on plants similar to the effect of drought on plants. Additionally, under freezing temperatures, plant cells lose water as a result of ice formation within the plant. Accordingly, crop damage from drought, heat, salinity, and cold stress, is predominantly due to dehydration.

[0006] Because plants are typically exposed to conditions of reduced water availability during their life cycle, most plants have evolved protective mechanisms against desiccation caused by abiotic stresses. However, if the severity and duration of desiccation conditions are too great, the effects on development, growth, plant size, and yield of most crop plants are profound. Developing plants efficient in water use is therefore a strategy that has the potential to significantly improve human life on a worldwide scale.

[0007] Traditional plant breeding strategies are relatively slow and require abiotic stress-tolerant founder lines for crossing with other germplasm to develop new abiotic stress-resistant lines. Limited germplasm resources for such founder lines and incompatibility in crosses between distantly related plant species represent significant problems encountered in conventional breeding. Breeding for tolerance has been largely unsuccessful.

[0008] Many agricultural biotechnology companies have attempted to identify genes that could confer tolerance to abiotic stress responses, in an effort to develop transgenic abiotic stress-tolerant crop plants. Although some genes that are involved in stress responses, biomass or water use efficiency in plants have been characterized, the characterization and cloning of plant genes that confer stress tolerance and/or water use efficiency remains largely incomplete and fragmented. To date, success at developing transgenic abiotic stress-tolerant crop plants has been limited, and no such plants have been commercialized. There is a need, therefore, to identify additional genes that have the capacity to increase yield of crop plants.

[0009] In order to develop transgenic abiotic stress-tolerant crop plants, it is necessary to assay a number of parameters in model plant systems, greenhouse studies of crop plants, and in field trials. For example, water use efficiency (WUE), is a parameter often correlated with drought tolerance. Studies of a plant's response to desiccation, osmotic shock, and temperature extremes are also employed to determine the plant's tolerance or resistance to abiotic stresses. When testing for the impact of the presence of a transgene on a plant's stress tolerance, the ability to standardize soil properties, temperature, water and nutrient availability and light intensity is an intrinsic advantage of greenhouse or plant growth chamber environments compared to the field.

[0010] WUE has been defined and measured in multiple ways. One approach is to calculate the ratio of whole plant dry weight, to the weight of water consumed by the plant throughout its life. Another variation is to use a shorter time interval when biomass accumulation and water use are measured. Yet another approach is to use measurements from restricted parts of the plant, for example, measuring only aerial growth and water use. WUE also has been defined as the ratio of CO₂ uptake to water vapor loss from a leaf or portion of a leaf, often measured over a very short time period (e.g. seconds/minutes). The ratio of ¹³C/¹²C fixed in plant tissue, and measured with an isotope ratio mass-spectrometer, also has been used to estimate WUE in plants using C₃ photosynthesis.

[0011] An increase in WUE is informative about the relatively improved efficiency of growth and water consumption, but this information taken alone does not indicate whether one of these two processes has changed or both have changed. In selecting traits for improving crops, an increase in WUE due to a decrease in water use, without a change in growth would have particular merit in an irrigated agricultural system where the water input costs were high. An increase in WUE driven mainly by an increase in growth without a corresponding jump in water use would have applicability to all agricultural systems. In many agricultural systems where water supply is not limiting, an increase in growth, even if it came at the expense of an increase in water use (i.e. no change in WUE), could also increase yield. Therefore, new methods to increase both WUE and biomass accumulation are required to improve agricultural productivity.

[0012] Grain yield improvements by conventional breeding have nearly reached a plateau in maize. Because the harvest index, the ratio of yield biomass to the total cumulative biomass at harvest, in maize has remained essentially unchanged during selection for grain yield over the last hundred or so years, the yield improvements have been realized from the increased total biomass production per unit land area. This increased total biomass has been achieved by increasing planting density, which has led to adaptive phenotypic alterations, such as a reduction in leaf angle and tassel size, the former to reduce shading of lower leaves and the latter perhaps to increase harvest index.

[0013] Concomitant with measurements of parameters that correlate with abiotic stress tolerance are measurements of parameters that indicate the potential impact of a transgene on crop yield. For forage crops like alfalfa, silage corn, and hay, the plant biomass correlates with the total yield. For grain crops, however, other parameters have been used to estimate yield, such as plant size, as measured by total plant dry weight, above-ground dry weight, above-ground fresh weight, leaf area, stem volume, plant height, rosette diameter, leaf length, root length, root mass, tiller number, and leaf number. Plant size at an early developmental stage will typically correlate with plant size later in development. A larger plant with a greater leaf area can typically absorb more light and carbon dioxide than a smaller plant and therefore will likely gain a greater weight during the same period. This is in addition to the potential continuation of the micro-environmental or genetic advantage that the plant had to achieve the larger size initially. There is a strong genetic component to plant size and growth rate, and so for a range of diverse genotypes plant size under one environmental condition is likely to correlate with size under another. In this way a standard environment is used to approximate the diverse and dynamic environments encountered at different locations and times by crops in the field.

[0014] Population increases and climate change have brought the possibility of global food, feed, and fuel shortages into sharp focus in recent years. Agriculture consumes 70% of water used by people, at a time when rainfall in many parts of the world is declining. In addition, as land use shifts from farms to cities and suburbs, fewer hectares of arable land are available to grow agricultural crops. Agricultural biotechnology has attempted to meet humanity's growing needs through genetic modifications of plants that could increase crop yield, for example, by conferring better tolerance to abiotic stress responses or by increasing biomass.

[0015] Crop yield is defined herein as the number of bushels of relevant agricultural product (such as grain, forage, or seed) harvested per acre. Crop yield is impacted by abiotic stresses, such as drought, heat, salinity, and cold stress, and by the size (biomass) of the plant. Traditional plant breeding strategies are relatively slow and have in general not been successful in conferring increased tolerance to abiotic stresses. Grain yield improvements by conventional breeding have nearly reached a plateau in maize. The harvest index, i.e., the ratio of yield biomass to the total cumulative biomass at harvest, in maize has remained essentially unchanged during selective breeding for grain yield over the last hundred years. Accordingly, recent yield improvements that have occurred in maize are the result of the increased total biomass production per unit land area. This increased total biomass has been achieved by increasing planting density, which has led to adaptive phenotypic alterations, such as a reduction in leaf angle, which may reduce shading of lower leaves, and tassel size, which may increase harvest index.

[0016] When soil water is depleted or if water is not available during periods of drought, crop yields are restricted. Plant water deficit develops if transpiration from leaves exceeds the supply of water from the roots. The available water supply is related to the amount of water held in the soil and the ability of the plant to reach that water with its root system. Transpiration of water from leaves is linked to the fixation of carbon dioxide by photosynthesis through the stomata. The two processes are positively correlated so that high carbon dioxide influx through photosynthesis is closely linked to water loss by transpiration. As water transpires from the leaf, leaf water potential is reduced and the stomata tend to close in a hydraulic process limiting the amount of photosynthesis. Since crop yield is dependent on the fixation of carbon dioxide in photosynthesis, water uptake and transpiration are contributing factors to crop yield. Plants which are able to use less water to fix the same amount of carbon dioxide or which are able to function normally at a lower water potential have the potential to conduct more photosynthesis and thereby to produce more biomass and economic yield in many agricultural systems.

[0017] Agricultural biotechnologists have used assays in model plant systems, greenhouse studies of crop plants, and field trials in their efforts to develop transgenic plants that exhibit increased yield, either through increases in abiotic stress tolerance or through increased biomass.

[0018] An increase in biomass at low water availability may be due to relatively improved efficiency of growth or reduced water consumption. In selecting traits for improving crops, a decrease in water use, without a change in growth would have particular merit in an irrigated agricultural system where the water input costs were high. An increase in growth without a corresponding jump in water use would have applicability to all agricultural systems. In many agricultural systems where water supply is not limiting, an increase in growth, even if it came at the expense of an increase in water use also increases yield.

[0019] Agricultural biotechnologists also use measurements of other parameters that indicate the potential impact of a transgene on crop yield. For forage crops like alfalfa, silage corn, and hay, the plant biomass correlates with the total yield. For grain crops, however, other parameters have been used to estimate yield, such as plant size, as measured by total plant dry weight, above-ground dry weight, above-ground fresh weight, leaf area, stem volume, plant height, rosette diameter, leaf length, root length, root mass, tiller number, and leaf number. Plant size at an early developmental stage will typically correlate with plant size later in development. A larger plant with a greater leaf area can typically absorb more light and carbon dioxide than a smaller plant and therefore will likely gain a greater weight during the same period. There is a strong genetic component to plant size and growth rate, and so for a range of diverse genotypes plant size under one environmental condition is likely to correlate with size under another. In this way a standard environment is used to approximate the diverse and dynamic environments encountered at different locations and times by crops in the field.

[0020] Harvest index, the ratio of seed yield to above-ground dry weight, is relatively stable under many environmental conditions and so a robust correlation between plant size and grain yield is possible. Plant size and grain yield are intrinsically linked, because the majority of grain biomass is dependent on current or stored photosynthetic productivity by the leaves and stem of the plant. Therefore, selecting for plant size, even at early stages of development, has been used as to screen for plants that may demonstrate increased yield when exposed to field testing. As with abiotic stress tolerance, measurements of plant size in early development, under standardized conditions in a growth chamber or greenhouse, are standard practices to measure potential yield advantages conferred by the presence of a transgene.

[0021] Fatty acids are crucial components of many processes related to growth and development and stress tolerance of plants. Fatty acids are sources of energy and as well being physical components of both intracellular membrane structures and extracellular structures, such as waxes in leaf cuticles. Fatty acid synthesis is strictly regulated in plants. FIG. 16 sets forth a summary diagram of fatty acid biosynthesis in plants.

[0022] Plant sterols comprise a group of compounds related to cholesterol, including campesterol, sitosterol and stigmasterol that are components of membrane bilayers. Sterol concentration and partitioning in the lipid bilayer influences the physical properties of the membranes such as fluidity and phase transitions. Cell membranes are sites for perturbation during environmental stress of plants. Brassinosteroids are a class of plant growth regulator that are synthesized from plant sterol precursors such as campesterol. Application of brassinosteroids to plants causes a diverse set of responses related to cell growth and development, including ethylene production, proton transport and cellulose microfibril orientation. Brassinosteroid biosynthesis mutants of Arabidopsis, pea and tomato are dwarf, indicating that brassinosteroid concentration regulates cell elongation in plants.

[0023] Plant sterols are synthesized from squalene, and the biochemical steps related to squalene synthesis from isopentenyl pyrophosphate are summarized in FIG. 23. Three enzymes act sequentially to produce plant sterols: geranyltranstransferase (EC 2.5.1.10, also denoted as farnesyl diphosphate synthase or FPS), squalene synthase (EC 2.5.1.21, also denoted as SQS or farnesyl-diphosphate farnesyltransferase), and squalene epoxidase (EC 1.14.99.7, also denoted as squalene monooxigenase).

[0024] There is a need, therefore, to identify additional genes expressed in stress tolerant plants and/or plants that are efficient in water use that have the capacity to confer stress tolerance and/or increased water use efficiency to the host plant and to other plant species. Newly generated stress tolerant plants and/or plants with increased water use efficiency will have many advantages, such as an increased range in which the crop plants can be cultivated, by for example, decreasing the water requirements of a plant species. Other desirable advantages include increased resistance to lodging, the bending of shoots or stems in response to wind, rain, pests, or disease.

[0025] The present inventors have found that transforming a plant with certain polynucleotides results in enhancement of the plant's growth and response to environmental stress, and accordingly the yield of the agricultural products of the plant is increased, when the polynucleotides are present in the plant as transgenes. The polynucleotides capable of mediating such enhancements have been isolated from Physcomitrella patens, Brassica napus, Zea mays, Glycine max, Linum usitatissimum, Oryza sativa, Helianthus annuus, Arabidopsis thaliana, Hordeum vulgare or Triticum aestivum, and the sequences thereof are set forth in the Sequence Listing as indicated in Table 1.

[0026] The term “table 1” used in this specification is to be taken to specify the content of table 1A, table 1B, table 10, table 1D, table 1E, table 1F and/or table 1G. The term “table 1A” used in this specification is to be taken to specify the content of table 1A. The term “table 1B” used in this specification is to be taken to specify the content of table 1B. The term “table 10” used in this specification is to be taken to specify the content of table 10. The term “table 1D” used in this specification is to be taken to specify the content of table 1D. The term “table 1E” used in this specification is to be taken to specify the content of table 1E. The term “table 1F” used in this specification is to be taken to specify the content of table 1F. The term “table 1G” used in this specification is to be taken to specify the content of table 1G.

[0027] In one preferred embodiment, the term “table 1” means table 1A. In another preferred embodiment, the term “table 1” means table 1B. In another preferred embodiment, the term “table 1” means table 10. In another preferred embodiment, the term “table 1” means table 1D. In another preferred embodiment, the term “table 1” means table 1E. In another preferred embodiment, the term “table 1” means table 1F. In another preferred embodiment, the term “table 1” means table 1G.

TABLE 1A

| | | Polynucleotide | Amino acid |
|---|---|---|---|
| Gene Name | Organism | SEQ ID NO | SEQ ID NO |
| GM47143343 | G. max | 1 | 2 |
| EST431 | P. patens | 3 | 4 |
| EST253 | P. patens | 5 | 6 |
| TA54298452 | T. aestivum | 7 | 8 |
| GM59742369 | G. max | 9 | 10 |
| LU61585372 | L. usitatissimum | 11 | 12 |
| BN44703759 | B. napus | 13 | 14 |
| GM59703946 | G. max | 15 | 16 |
| GM59589775 | G. max | 17 | 18 |
| LU61696985 | L. usitatissimum | 19 | 20 |
| ZM62001130 | Z. mays | 21 | 22 |
| HA66796355 | H. annuus | 23 | 24 |
| LU61684898 | L. usitatissimum | 25 | 26 |
| LU61597381 | L. usitatissimum | 27 | 28 |
| EST272 | P. patens | 29 | 30 |
| BN42920374 | B. napus | 31 | 32 |
| BN45700248 | B. napus | 33 | 34 |
| BN47678601 | B. napus | 35 | 36 |
| GMsj02a06 | G. max | 37 | 38 |
| GM50305602 | G. max | 39 | 40 |
| EST500 | P. patens | 41 | 42 |
| EST401 | P. patens | 43 | 44 |
| BN51391539 | B. napus | 45 | 46 |
| GM59762784 | G. max | 47 | 48 |
| BN44099508 | B. napus | 49 | 50 |
| BN45789913 | B. napus | 51 | 52 |
| BN47959187 | B. napus | 53 | 54 |
| BN51418316 | B. napus | 55 | 56 |
| GM59691587 | G. max | 57 | 58 |
| ZM62219224 | Z. mays | 59 | 60 |
| EST591 | P. patens | 61 | 62 |
| BN51345938 | B. napus | 63 | 64 |
| BN51456960 | B. napus | 65 | 66 |
| BN43562070 | B. napus | 67 | 68 |
| TA60004809 | T. aestivum | 69 | 70 |
| ZM62079719 | Z. mays | 71 | 72 |
| BN42110642 | B. napus | 73 | 74 |
| GM59794180 | G. max | 75 | 76 |
| GMsp52b07 | G. max | 77 | 78 |
| ZM57272608 | Z. mays | 79 | 80 |
| EST336 | P. patens | 81 | 82 |
| BN43012559 | B. napus | 83 | 84 |
| BN44705066 | B. napus | 85 | 86 |
| GM50962576 | G. max | 87 | 88 |
| GMsk93h09 | G. max | 89 | 90 |
| GMso31a02 | G. max | 91 | 92 |
| LU61649369 | L. usitatissimum | 93 | 94 |
| LU61704197 | L. usitatissimum | 95 | 96 |
| ZM57508275 | Z. mays | 97 | 98 |
| ZM59288476 | Z. mays | 99 | 100 |

[0028] In another embodiment, the invention provides a transgenic plant transformed with an expression cassette comprising an isolated polynucleotide encoding a mitogen activated protein kinase comprising a protein kinase domain of SEQ ID NO:2; SEQ ID NO:4; SEQ ID NO:6; SEQ ID NO:8; SEQ ID NO:10; SEQ ID NO:12; SEQ ID NO:14; SEQ ID NO:16; SEQ ID NO:18; SEQ ID NO:20; SEQ ID NO:22; SEQ ID NO:24; SEQ ID NO:26; SEQ ID NO:28; SEQ ID NO:30; SEQ ID NO:32; SEQ ID NO:34; SEQ ID NO:36; or SEQ ID NO:38.

[0029] In another embodiment, the invention provides a transgenic plant transformed with an expression cassette comprising an isolated polynucleotide encoding a calcium dependent protein kinase comprising a protein kinase domain of SEQ ID NO:40; SEQ ID NO:42; SEQ ID NO:44; SEQ ID NO:46; SEQ ID NO:48; SEQ ID NO:50; SEQ ID NO:52; SEQ ID NO:54; SEQ ID NO:56; SEQ ID NO:58; SEQ ID NO:60; SEQ ID NO:62; SEQ ID NO:64; SEQ ID NO:66; SEQ ID NO:68; SEQ ID NO:70; or SEQ ID NO:72.

[0030] In another embodiment, the invention provides a transgenic plant transformed with an expression cassette comprising an isolated polynucleotide encoding a cyclin dependent protein kinase comprising a protein kinase domain of SEQ ID NO:74; SEQ ID NO:76; SEQ ID NO:78; or SEQ ID NO:80.

[0031] In another embodiment, the invention provides a transgenic plant transformed with an expression cassette comprising an isolated polynucleotide encoding a probable serine/threonine-specific protein kinase comprising a protein kinase domain of SEQ ID NO:82; SEQ ID NO:84; SEQ ID NO:86; SEQ ID NO:88; SEQ ID NO:90; SEQ ID NO:92; SEQ ID NO:94; SEQ ID NO:96; SEQ ID NO:98; SEQ ID NO:100.

TABLE 1B

| | | Polynucleotide | Amino acid |
|---|---|---|---|
| Gene Name | Organism | SEQ ID NO | SEQ ID NO |
| BN42194524 | B. napus | 101 | 102 |
| ZM68498581 | Z. mays | 103 | 104 |
| BN42062606 | B. napus | 105 | 106 |
| BN42261838 | B. napus | 107 | 108 |
| BN43722096 | B. napus | 109 | 110 |
| GM50585691 | G. max | 111 | 112 |
| GMsa56c07 | G. max | 113 | 114 |
| GMsb20d04 | G. max | 115 | 116 |
| GMsg04a02 | G. max | 117 | 118 |
| GMsp36c10 | G. max | 119 | 120 |
| GMsp82f11 | G. max | 121 | 122 |
| GMss66f03 | G. max | 123 | 124 |
| LU61748885 | L. usitatissimum | 125 | 126 |
| OS36582281 | O. sativa | 127 | 128 |
| OS40057356 | O. sativa | 129 | 130 |
| ZM57588094 | Z. mays | 131 | 132 |
| ZM67281604 | Z. mays | 133 | 134 |
| ZM68466470 | Z. mays | 135 | 136 |

[0032] In another embodiment, the invention provides a transgenic plant transformed with an expression cassette comprising an isolated polynucleotide encoding a full-length polypeptide having phospholipid hydroperoxide glutathione peroxidase activity, wherein the polypeptide comprises a glutathione peroxidase domain of SEQ ID NO:102; SEQ ID NO:104; SEQ ID NO:106; SEQ ID NO:108; SEQ ID NO:110; SEQ ID NO:112; SEQ ID NO:114; SEQ ID NO:116; SEQ ID NO:118; SEQ ID NO:120; SEQ ID NO:122; SEQ ID NO:124; SEQ ID NO:126; SEQ ID NO:128; SEQ ID NO:130; SEQ ID NO:132; SEQ ID NO:134; or SEQ ID NO:136.

TABLE 1C

| | | Polynucleotide | Amino acid |
|---|---|---|---|
| Gene Name | Organism | SEQ ID NO | SEQ ID NO |
| BN45660154_5 | B. napus | 137 | 138 |
| BN45660154_8 | B. napus | 139 | 140 |
| ZM58885021 | Z. mays | 141 | 142 |
| BN46929759 | B. napus | 143 | 144 |
| BN43100775 | B. napus | 145 | 146 |
| GM59673822 | G. max | 147 | 148 |
| ZM59314493 | Z. mays | 149 | 150 |
| GMsk21ga12 | G. max | 151 | 152 |
| ZM62043790 | Z. mays | 153 | 154 |
| GMsk21g122 | G. max | 155 | 156 |
| AT5G60750 | A. thaliana | 157 | 158 |
| BN47819599 | B. napus | 159 | 160 |
| ZM65102675 | Z. mays | 161 | 162 |
| BN51278543 | B. napus | 163 | 164 |
| GM59587627 | G. max | 165 | 166 |
| GMsae76c10 | G. max | 167 | 168 |
| ZM68403475 | Z. mays | 169 | 170 |
| ZMTD140063555 | Z. mays | 171 | 172 |
| BN43069781 | B. napus | 173 | 174 |
| BN48622391 | B. napus | 175 | 176 |
| GM50247805 | G. max | 177 | 178 |
| ZM62208861 | Z. mays | 179 | 180 |
| GM49819537 | G. max | 181 | 182 |
| BN42562310 | B. napus | 183 | 184 |
| GM47121078 | G. max | 185 | 186 |
| GMsf89h03 | G. max | 187 | 188 |
| HA66670700 | H. annuus | 189 | 190 |
| GM50390979 | G. max | 191 | 192 |
| GM597200141 | G. max | 193 | 194 |
| GMsab62c11 | G. max | 195 | 196 |
| GMsl42e03 | G. max | 197 | 198 |
| GMss72c01 | G. max | 199 | 200 |
| HV100766 | H. vulgare | 201 | 202 |
| EST397 | P. patens | 203 | 204 |
| ZM57926241 | Z. mays | 205 | 206 |

TABLE 1D

| | | Polynucleotide | Amino acid |
|---|---|---|---|
| Gene Name | Organism | SEQ ID NO | SEQ ID NO |
| EST285 | P. patens | 207 | 208 |
| BN42471769 | B. napus | 209 | 210 |
| ZM100324 | Z. mays | 211 | 212 |
| BN42817730 | B. napus | 213 | 214 |
| BN45236208 | B. napus | 215 | 216 |
| BN46730374 | B. napus | 217 | 218 |
| BN46832560 | B. napus | 219 | 220 |
| BN46868821 | B. napus | 221 | 222 |
| GM48927342 | G. max | 223 | 224 |
| GM48955695 | G. max | 225 | 226 |
| GM48958569 | G. max | 227 | 228 |
| GM50526381 | G. max | 229 | 230 |
| HA66511283 | H. annuus | 231 | 232 |
| HA66563970 | H. annuus | 233 | 234 |
| HA66692703 | H. annuus | 235 | 236 |
| HA66822928 | H. annuus | 237 | 238 |
| LU61569679 | L. usitatissimum | 239 | 240 |
| LU61703351 | L. usitatissimum | 241 | 242 |
| LU61962194 | L. usitatissimum | 243 | 244 |
| TA54564073 | T. aestivum | 245 | 246 |
| TA54788773 | T. aestivum | 247 | 248 |
| TA56412836 | T. aestivum | 249 | 250 |
| ZM65144673 | Z. mays | 251 | 252 |

TABLE 1E

| | | Polynucleotide | Amino Acid |
|---|---|---|---|
| Gene Name | Organism | SEQ ID NO | SEQ ID NO |
| EST314 | P. patens | 253 | 254 |
| EST322 | P. patens | 255 | 256 |
| EST589 | P. patens | 257 | 258 |
| BN45899621 | B. napus | 259 | 260 |
| BN51334240 | B. napus | 261 | 262 |
| BN51345476 | B. napus | 263 | 264 |
| BN42856089 | B. napus | 265 | 266 |
| BN43206527 | B. napus | 267 | 268 |
| GMsf85h09 | G. max | 269 | 270 |
| GMsj98e01 | G. max | 271 | 272 |
| GMsu65h07 | G. max | 273 | 274 |
| HA66777473 | H. annuus | 275 | 276 |
| LU61781371 | L. usitatissimum | 277 | 278 |
| LU61589678 | L. usitatissimum | 279 | 280 |
| LU61857781 | L. usitatissimum | 281 | 282 |
| TA55079288 | T. aestivum | 283 | 284 |
| ZM59400933 | Z. mays | 285 | 286 |

[0033] In one embodiment, the invention provides the novel isolated polynucleotides and proteins of Table 1.

[0034] In another embodiment, the invention provides a transgenic plant transformed with an expression cassette comprising an isolated polynucleotide encoding a full-length polypeptide comprising a TCP family transcription factor domain of SEQ ID NO:138; SEQ ID NO:140; SEQ ID NO:142; or SEQ ID NO:144.

[0035] In another embodiment, the invention provides a transgenic plant transformed with an expression cassette comprising an isolated polynucleotide encoding a ribosomal protein S6 kinase polypeptide comprising a kinase domain of SEQ ID NO:146; SEQ ID NO:148; or SEQ ID NO:150.

[0036] In another embodiment, the invention provides a transgenic plant transformed with an expression cassette comprising an isolated polynucleotide encoding a full-length polypeptide comprising a CAAX amino terminal protease family protein domain of SEQ ID NO:158; SEQ ID NO:160; or SEQ ID NO:162.

[0037] In another embodiment, the invention provides a transgenic plant transformed with an expression cassette comprising an isolated polynucleotide encoding a DNA binding protein comprising a metallopeptidase family M24 domain of SEQ ID NO:164; SEQ ID NO:166; SEQ ID NO:168; or SEQ ID NO:170; or SEQ ID NO:172.

[0038] In another embodiment, the invention provides a transgenic plant transformed with an expression cassette comprising an isolated polynucleotide encoding a rev interacting protein mis3 selected from the group consisting of SEQ ID NO:176; SEQ ID NO:178; and SEQ ID NO:180.

[0039] In another embodiment, the invention provides a transgenic plant transformed with an expression cassette comprising an isolated polynucleotide encoding a GRF1 interacting factor comprising an SSXT protein (N terminal region) domain of SEQ ID NO:182; SEQ ID NO:184; SEQ ID NO:186; or SEQ ID NO:188.

[0040] In another embodiment, the invention provides a transgenic plant transformed with an expression cassette comprising an isolated polynucleotide encoding a eukaryotic translation initiation factor 4A comprising a helicase of SEQ ID NO:190; SEQ ID NO:192; SEQ ID NO:194; or SEQ ID NO:196; SEQ ID NO:198; or SEQ ID NO:200.

[0041] In another embodiment, the invention provides a transgenic plant transformed with an expression cassette comprising an isolated polynucleotide encoding a full-length TGF beta receptor interacting protein comprising a WD domain of SEQ ID NO:152; SEQ ID NO:154; or SEQ ID NO:156.

[0042] In another embodiment, the invention provides a transgenic plant transformed with an expression cassette comprising an isolated polynucleotide having a sequence selected from the group consisting of SEQ ID NO:173; SEQ ID NO:201; SEQ ID NO:203; and SEQ ID NO:205.

[0043] In one embodiment, the invention provides a transgenic plant transformed with an expression cassette comprising an isolated polynucleotide encoding an AP2 domain containing protein.

[0044] In one embodiment, the invention provides a transgenic plant transformed with an expression cassette comprising an isolated polynucleotide encoding a brassinosteroid biosynthetic LKB-like protein comprising a LKB-like transmembrane domain of SEQ ID NO:254.

[0045] In another embodiment, the invention provides a transgenic plant transformed with an expression cassette comprising an isolated polynucleotide encoding a RING box protein comprising a RING box domain of SEQ ID NO:256.

[0046] In another embodiment, the invention provides a transgenic plant transformed with an expression cassette comprising an isolated polynucleotide encoding a serine/threonine protein phosphatase comprising a protein phosphatase domain of SEQ ID NO:258; SEQ ID NO:260; SEQ ID NO:262; SEQ ID NO:264; SEQ ID NO:266; SEQ ID NO:268; SEQ ID NO:270; SEQ ID NO:272; SEQ ID NO:274; SEQ ID NO:276; SEQ ID NO:278; SEQ ID NO:280; SEQ ID NO:282; SEQ ID NO:284; SEQ ID NO:286.

[0047] The present inventors have found that there are three critical components that must be optimized to achieve improvement in plant yield through the modification of fatty acid metabolism—the subcellular targeting of the protein, the level of gene expression and the regulatory properties of the protein. When targeted as described herein, the fatty acid metabolic polynucleotides and polypeptides set forth in Table 1F and Table 1G are capable of improving yield of transgenic plants.

TABLE 1F

| | | Polynucleotide | Amino acid SEQ |
|---|---|---|---|
| Gene Name | Organism | SEQ ID NO | ID NO |
| b1805 | Escherichia coli | 287 | 288 |
| YER015W | Saccharomyces | 289 | 290 |
| | cerevisiae | | |
| GM59544909 | G. max | 291 | 292 |
| GM59627238 | G. max | 293 | 294 |
| GM59727707 | G. max | 295 | 296 |
| ZM57432637 | Z. mays | 297 | 298 |
| ZM58913368 | Z. mays | 299 | 300 |
| ZM62001931 | Z. mays | 301 | 302 |
| ZM65438309 | Z. mays | 303 | 304 |
| GM59610424 | G. max | 305 | 306 |
| GM59661358 | G. max | 307 | 308 |
| GMst55d11 | G. max | 309 | 310 |
| ZM65362798 | Z. mays | 311 | 312 |
| ZM62261160 | Z. mays | 313 | 314 |
| ZM62152441 | Z. mays | 315 | 316 |
| b1091 | E. coli | 317 | 318 |
| b0185 | E. coli | 319 | 320 |
| b3256 | E. coli | 321 | 322 |
| BN49370246 | B. napus | 323 | 324 |
| GM59606041 | G. max | 325 | 326 |
| GM59537012 | G. max | 327 | 328 |
| b3255 | E. coli | 329 | 330 |
| BN49342080 | B. napus | 331 | 332 |
| BN45576739 | B. napus | 333 | 334 |
| b1095 | E. coli | 335 | 336 |
| GM48933354 | G. max | 337 | 338 |
| ZM59397765 | Zea mays | 339 | 340 |
| GM59563409 | G. max | 341 | 342 |
| B1093 | E. coli | 343 | 344 |
| slr0886 | Synechocystis | 345 | 346 |
| | PCC6803 | | |
| BN44033445 | B. napus | 347 | 348 |
| BN43251017 | B. napus | 349 | 350 |
| BN42133443 | B. napus | 351 | 352 |
| GM49771427 | G. max | 353 | 354 |
| GM48925912 | G. max | 355 | 356 |
| GM51007060 | G. max | 357 | 358 |
| GM59598120 | G. max | 359 | 360 |
| GM59619826 | G. max | 361 | 362 |
| GMsaa65f11 | G. max | 363 | 364 |
| GMsf29g01 | G. max | 365 | 366 |
| GMsn33h01 | G. max | 367 | 368 |
| GMsp73h12 | G. max | 369 | 370 |
| GMst67g06 | G. max | 371 | 372 |
| GMsu14e09 | G. max | 373 | 374 |
| GMsu65c05 | G. max | 375 | 376 |
| HV62626732 | H. vulgare | 377 | 378 |
| LU61764715 | L. usitatissimum | 379 | 380 |
| OS32620492 | O. sativa | 381 | 382 |
| ZM57377353 | Z. mays | 383 | 384 |
| ZM58204125 | Z. mays | 385 | 386 |
| ZM58594846 | Z. mays | 387 | 388 |
| ZM62192824 | Z. mays | 389 | 390 |
| ZM65173545 | Z. mays | 391 | 392 |
| ZM65173829 | Z. mays | 393 | 394 |
| ZM57603160 | Z. mays | 395 | 396 |
| slr1364 | Synechocystis | 397 | 398 |
| | PCC6803 | | |
| BN51403883 | B. napus | 399 | 400 |
| ZM65220870 | Z. mays | 401 | 402 |

[0048] In one embodiment, the invention provides a transgenic plant transformed with an expression cassette comprising, in operative association, an isolated polynucleotide encoding a promoter capable of enhancing gene expression in leaves; and an isolated polynucleotide encoding a full-length polypeptide which is a long-chain-fatty-acid-CoA ligase subunit of acyl-CoA synthetase; wherein the transgenic plant demonstrates increased yield as compared to a wild type plant of the same variety which does not comprise the expression cassette.

[0049] In another embodiment, the invention provides a transgenic plant transformed with an expression cassette comprising, in operative association, an isolated polynucleotide encoding a promoter capable of enhancing gene expression in leaves; and an isolated polynucleotide encoding a full-length beta-ketoacyl-acyl carrier protein (hereinafter “ACP”) synthase polypeptide, wherein the transgenic plant demonstrates increased yield as compared to a wild type plant of the same variety which does not comprise the expression cassette.

[0050] In another embodiment, the invention provides a transgenic plant transformed with an expression cassette comprising in operative association, an isolated polynucleotide encoding a promoter capable of enhancing gene expression in leaves; an isolated polynucleotide encoding a mitochondrial transit peptide; and an isolated polynucleotide encoding a subunit of an acetyl-CoA carboxylase complex, wherein the transgenic plant demonstrates increased yield as compared to a wild type plant of the same variety which does not comprise the expression cassette. In accordance with this embodiment, the acetyl-CoA carboxylase subunit may be an acetyl-CoA carboxylase, a biotin carboxylase, or a biotin carboxyl carrier protein.

[0051] In another embodiment, the invention provides a transgenic plant transformed with an expression cassette comprising, in operative association, an isolated polynucleotide encoding a promoter capable of enhancing gene expression in leaves; an isolated polynucleotide encoding a mitochondrial transit peptide; and an isolated polynucleotide encoding a full-length 3-oxoacyl-[ACP] synthase II polypeptide; wherein the transgenic plant demonstrates increased yield as compared to a wild type plant of the same variety which does not comprise the expression cassette.

[0052] In another embodiment, the invention provides a transgenic plant transformed with an expression cassette comprising, in operative association, an isolated polynucleotide encoding a promoter and an isolated polynucleotide encoding a full-length 3-oxoacyl-[ACP] reductase polypeptide; wherein the transgenic plant demonstrates increased yield as compared to a wild type plant of the same variety which does not comprise the expression cassette. The promoter employed in the expression vector of this embodiment may optionally be capable of enhancing expression in leaves. Morover, the expression vector of this embodiment may optionally comprise a mitochondrial or chloroplast transit peptide.

[0053] In another embodiment, the invention provides a transgenic plant transformed with an expression cassette comprising, in operative association, an isolated polynucleotide encoding a promoter, an isolated polynucleotide encoding a mitochondrial transit peptide, and an isolated polynucleotide encoding a full-length biotin synthetase polypeptide, wherein the transgenic plant demonstrates increased yield as compared to a wild type plant of the same variety which does not comprise the expression cassette.

TABLE 1G

| | | Polynucleotide | Amino acid SEQ |
|---|---|---|---|
| Gene Name | Organism | SEQ ID NO | ID NO |
| B0421 | Escherichia coli | 413 | 414 |
| YJL167W | Saccharomyces | 415 | 416 |
| | cerevisiae | | |
| BN42777400 | Brassica napus | 417 | 418 |
| BN43165280 | B. napus | 419 | 420 |
| GMsf33b12 | Glycine max | 421 | 422 |
| GMsa58c11 | G. max | 423 | 424 |
| GM48958315 | G. max | 425 | 426 |
| TA55347042 | T. aestivum | 427 | 428 |
| TA59981866 | T. aestivum | 429 | 430 |
| ZM68702208 | Zea mays | 431 | 432 |
| ZM62161138 | Z. mays | 433 | 434 |
| SQS1 | synthetic | 435 | 436 |
| SQS2 | synthetic | 437 | 438 |
| BN51386398 | B. napus | 439 | 440 |
| GM59738015 | G. max | 441 | 442 |
| ZM68433599 | Z. mays | 443 | 444 |
| YGR175C | S. cerevisiae | 445 | 446 |
| BN48837983 | B. napus | 447 | 448 |
| ZM62269276 | Z. mays | 449 | 450 |

[0054] In one embodiment, the invention provides a transgenic plant transformed with an expression cassette comprising, in operative association, an isolated polynucleotide encoding a promoter capable of enhancing gene expression in leaves; and an isolated polynucleotide encoding a mitochondrial transit peptide; and an isolated polynucleotide encoding a full-length polypeptide which is a farnesyl diphosphate synthase (hereinafter “FPS”); wherein the transgenic plant demonstrates increased yield as compared to a wild type plant of the same variety which does not comprise the expression cassette.

[0055] In another embodiment, the invention provides a transgenic plant transformed with an expression cassette comprising, in operative association, an isolated polynucleotide encoding a promoter capable of enhancing gene expression in leaves; an isolated polynucleotide encoding a chloroplast transit peptide, and an isolated polynucleotide encoding a full-length squalene synthase polypeptide, wherein the transgenic plant demonstrates increased yield as compared to a wild type plant of the same variety which does not comprise the expression cassette.

[0056] In another embodiment, the invention provides a transgenic plant transformed with an expression cassette comprising, in operative association, an isolated polynucleotide encoding a promoter capable of enhancing gene expression in leaves; an isolated polynucleotide encoding a chloroplast transit peptide; and an isolated polynucleotide encoding a full-length squalene epoxidase polypeptide; wherein the transgenic plant demonstrates increased yield as compared to a wild type plant of the same variety which does not comprise the expression cassette.

[0057] In a further embodiment, the invention concerns a seed produced by the transgenic plant of the invention, wherein the seed is true breeding for a transgene comprising the polynucleotide described above. Plants derived from the seed of the invention demonstrate increased tolerance to an environmental stress, and/or increased plant growth, and/or increased yield, under normal or stress conditions as compared to a wild type variety of the plant.

[0058] In a still another aspect, the invention concerns products produced by or from the transgenic plants of the invention, their plant parts, or their seeds, such as a foodstuff, fiber, feedstuff, food supplement, feed supplement, cosmetic or pharmaceutical.

[0059] The invention further provides certain isolated polynucleotides identified in Table 1, and certain isolated polypeptides identified in Table 1. The invention is also embodied in recombinant vector comprising an isolated polynucleotide of the invention.

[0060] In yet another embodiment, the invention concerns a method of producing the aforesaid transgenic plant, wherein the method comprises transforming a plant cell with an expression vector comprising an isolated polynucleotide of the invention, and generating from the plant cell a transgenic plant that expresses the polypeptide encoded by the polynucleotide. Expression of the polypeptide in the plant results in increased tolerance to an environmental stress, and/or growth, and/or yield under normal and/or stress conditions as compared to a wild type variety of the plant.

[0061] In still another embodiment, the invention provides a method of increasing a plant's tolerance to an environmental stress, and/or growth, and/or yield. The method comprises the steps of transforming a plant cell with an expression cassette comprising an isolated polynucleotide of the invention, and generating a transgenic plant from the plant cell, wherein the transgenic plant comprises the polynucleotide.

### DETAILED DESCRIPTION OF THE PREFERRED EMBODIMENTS

[0062] Throughout this application, various publications are referenced. The disclosures of all of these publications and those references cited within those publications in their entireties are hereby incorporated by reference into this application in order to more fully describe the state of the art to which this invention pertains. The terminology used herein is for the purpose of describing specific embodiments only and is not intended to be limiting. As used herein, “a” or “an” can mean one or more, depending upon the context in which it is used. Thus, for example, reference to “a cell” can mean that at least one cell can be used.

[0063] In one embodiment, the invention provides a transgenic plant that overexpresses an isolated polynucleotide identified in Table 1, or a homolog thereof. The transgenic plant of the invention demonstrates an increased tolerance to an environmental stress as compared to a wild type variety of the plant. The overexpression of such isolated nucleic acids in the plant may optionally result in an increase in plant growth or in yield of associated agricultural products, under normal or stress conditions, as compared to a wild type variety of the plant. Such yield increases may result from promotion of floral organ development, root initiation, and yield, and for modulating leaf formation, phototropism, apical dominance, fruit development and the like.

[0064] As defined herein, a “transgenic plant” is a plant that has been altered using recombinant DNA technology to contain an isolated nucleic acid which would otherwise not be present in the plant. As used herein, the term “plant” includes a whole plant, plant cells, and plant parts. Plant parts include, but are not limited to, stems, roots, ovules, stamens, leaves, embryos, meristematic regions, callus tissue, gametophytes, sporophytes, pollen, microspores, and the like. The transgenic plant of the invention may be male sterile or male fertile, and may further include transgenes other than those that comprise the isolated polynucleotides described herein.

[0065] As used herein, the term “variety” refers to a group of plants within a species that share constant characteristics that separate them from the typical form and from other possible varieties within that species. While possessing at least one distinctive trait, a variety is also characterized by some variation between individuals within the variety, based primarily on the Mendelian segregation of traits among the progeny of succeeding generations. A variety is considered “true breeding” for a particular trait if it is genetically homozygous for that trait to the extent that, when the true-breeding variety is self-pollinated, a significant amount of independent segregation of the trait among the progeny is not observed. In the present invention, the trait arises from the transgenic expression of one or more isolated polynucleotides introduced into a plant variety. As also used herein, the term “wild type variety” refers to a group of plants that are analyzed for comparative purposes as a control plant, wherein the wild type variety plant is identical to the transgenic plant (plant transformed with an isolated polynucleotide in accordance with the invention) with the exception that the wild type variety plant has not been transformed with an isolated polynucleotide of the invention. The term “wild type” as used herein refers to a plant cell, seed, plant component, plant tissue, plant organ, or whole plant that has not been genetically modified with an isolated polynucleotide in accordance with the invention.

[0066] The term “control plant” as used herein refers to a plant cell, an explant, seed, plant component, plant tissue, plant organ, or whole plant used to compare against transgenic or genetically modified plant for the purpose of identifying an enhanced phenotype or a desirable trait in the transgenic or genetically modified plant. A “control plant” may in some cases be a transgenic plant line that comprises an empty vector or marker gene, but does not contain the recombinant polynucleotide of interest that is present in the transgenic or genetically modified plant being evaluated. A control plant may be a plant of the same line or variety as the transgenic or genetically modified plant being tested, or it may be another line or variety, such as a plant known to have a specific phenotype, characteristic, or known genotype. A suitable control plant would include a genetically unaltered or non-transgenic plant of the parental line used to generate a transgenic plant herein.

[0067] As defined herein, the term “nucleic acid” and “polynucleotide” are interchangeable and refer to RNA or DNA that is linear or branched, single or double stranded, or a hybrid thereof. The term also encompasses RNA/DNA hybrids. An “isolated” nucleic acid molecule is one that is substantially separated from other nucleic acid molecules which are present in the natural source of the nucleic acid (i.e., sequences encoding other polypeptides). For example, a cloned nucleic acid is considered isolated. A nucleic acid is also considered isolated if it has been altered by human intervention, or placed in a locus or location that is not its natural site, or if it is introduced into a cell by transformation. Moreover, an isolated nucleic acid molecule, such as a cDNA molecule, can be free from some of the other cellular material with which it is naturally associated, or culture medium when produced by recombinant techniques, or chemical precursors or other chemicals when chemically synthesized. While it may optionally encompass untranslated sequence located at both the 3′ and 5′ ends of the coding region of a gene, it may be preferable to remove the sequences which naturally flank the coding region in its naturally occurring replicon.

[0068] As used herein, the term “environmental stress” refers to a sub-optimal condition associated with salinity, drought, nitrogen, temperature, metal, chemical, pathogenic, or oxidative stresses, or any combination thereof. The terms “water use efficiency” and “WUE” refer to the amount of organic matter produced by a plant divided by the amount of water used by the plant in producing it, i.e., the dry weight of a plant in relation to the plant's water use. As used herein, the term “drought” refers to an environmental condition where the amount of water available to support plant growth or development is less than optimal. As used herein, the term “fresh weight” refers to everything in the plant including water. As used herein, the term “dry weight” refers to everything in the plant other than water, and includes, for example, carbohydrates, proteins, oils, and mineral nutrients.

[0069] Any plant species may be transformed to create a transgenic plant in accordance with the invention. The transgenic plant of the invention may be a dicotyledonous plant or a monocotyledonous plant. For example and without limitation, transgenic plants of the invention may be derived from any of the following diclotyledonous plant families: Leguminosae, including plants such as pea, alfalfa and soybean; Umbelliferae, including plants such as carrot and celery; Solanaceae, including the plants such as tomato, potato, aubergine, tobacco, and pepper; Cruciferae, Brassicaceae, particularly the genus Brassica, which includes plant such as oilseed rape, beet, cabbage, cauliflower and broccoli); and A. thaliana; Compositae, which includes plants such as lettuce; Malvaceae, which includes cotton; Fabaceae, which includes plants such as peanut, and the like. Transgenic plants of the invention may be derived from monocotyledonous plants, such as, for example, wheat, barley, sorghum, millet, rye, triticale, maize, rice, oats and sugarcane. Transgenic plants of the invention are also embodied as trees such as apple, pear, quince, plum, cherry, peach, nectarine, apricot, papaya, mango, and other woody species including coniferous and deciduous trees such as poplar, pine, sequoia, cedar, oak, and the like. Especially preferred are Arabidopsis thaliana, Nicotiana tabacum, oilseed rape, soybean, corn (maize), canola, cotton, wheat, linseed, potato and tagetes.

[0070] In one embodiment, the invention provides a transgenic plant transformed with an expression cassette comprising an isolated polynucleotide encoding mitogen activated protein kinase. The transgenic plant of this embodiment may comprise any polynucleotide encoding a mitogen activated protein kinase. Preferably, the transgenic plant of this embodiment comprises a polynucleotide encoding a full-length polypeptide having mitogen activated protein kinase activity, wherein the polypeptide comprises a domain selected from the group consisting of a domain having a sequence comprising amino acids 32 to 319 of SEQ ID NO:2; amino acids 42 to 329 of SEQ ID NO:4; amino acids 32 to 319 of SEQ ID NO:6; amino acids 32 to 310 of SEQ ID NO:8; amino acids 32 to 319 of SEQ ID NO:10; amino acids 32 to 319 of SEQ ID NO:12; amino acids 28 to 318 of SEQ ID NO:14; amino acids 32 to 326 of SEQ ID NO:16; amino acids 38 to 325 of SEQ ID NO:18; amino acids 44 to 331 of SEQ ID NO:20; amino acids 40 to 357 of SEQ ID NO:22; amino acids 60 to 346 of SEQ ID NO:24; amino acids 74 to 360 of SEQ ID NO:26; amino acids 47 to 334 of SEQ ID NO:28; amino acids 38 to 325 of SEQ ID NO:30; amino acids 32 to 319 of SEQ ID NO:32; amino acids 41 to 327 of SEQ ID NO:34; amino acids 43 to 329 of SEQ ID NO:36; and amino acids 58 to 344 of SEQ ID NO:38. Mitogen-activated protein kinases are characterized by the T-loop portion of their protein kinase domain which contains the amino acid motif TDY or TEY. This motif is a phosphorylation target of mitogen-activated protein kinase kinases, which are the next step in this type of signal transduction pathway. All of the domains described herein as being a part of a mitogen-activated protein kinase contain such a motif in register with the overall alignment provided in FIG. 1. More preferably, the transgenic plant of this embodiment comprises a polynucleotide encoding a mitogen activated protein kinase having a sequence comprising amino acids 1 to 368 of SEQ ID NO:2; amino acids 1 to 376 of SEQ ID NO:4; amino acids 1 to 368 of SEQ ID NO:6; amino acids 1 to 369 of SEQ ID NO:8; amino acids 1 to 371 of SEQ ID NO:10; amino acids 1 to 375 of SEQ ID NO:12; amino acids 1 to 523 of SEQ ID NO:14; amino acids 1 to 563 of SEQ ID NO:16; amino acids 1 to 373 of SEQ ID NO:18; amino acids 1 to 377 of SEQ ID NO:20; amino acids 1 to 404 of SEQ ID NO:22; amino acids 1 to 394 of SEQ ID NO:24; amino acids 1 to 415 of SEQ ID NO:26; amino acids 1 to 381 of SEQ ID NO:28; amino acids 1 to 376 of SEQ ID NO:30; amino acids 1 to 368 of SEQ ID NO:32; amino acids 1 to 372 of SEQ ID NO:34; amino acids 1 to 374 of SEQ ID NO:36; or amino acids 1 to 372 of SEQ ID NO:38.

[0071] In another embodiment, the invention provides a transgenic plant transformed with an expression cassette comprising an isolated polynucleotide encoding calcium dependent protein kinase. Plant-derived calcium-dependent protein kinases are characterized, in part, by the fusion of a protein kinase domain with a calmodulin-like calcium-binding domain. The calmodulin-like domain contains one or more calcium-binding EF hand structural motifs. All polypeptides listed herein as being a calcium-dependent protein kinase contain motifs characteristic of protein kinase domains and EF hand motifs.

[0072] The transgenic plant of this embodiment may comprise any polynucleotide encoding a calcium dependent protein kinase. Preferably, the transgenic plant of this embodiment comprises a polynucleotide encoding a full-length polypeptide having calcium dependent protein kinase activity, wherein the polypeptide comprises a protein kinase domain selected from the group consisting of a domain having a sequence comprising amino acids 59 to 317 of SEQ ID NO:40; amino acids 111 to 369 of SEQ ID NO:42; amino acids 126 to 386 of SEQ ID NO:44; amino acids 79 to 337 of SEQ ID NO:46; amino acids 80 to 338 of SEQ ID NO:48; amino acids 125 to 287 of SEQ ID NO:50; amino acids 129 to 391 of SEQ ID NO:52; amino acids 111 to 371 of SEQ ID NO:54; amino acids 61 to 319 of SEQ ID NO:56; amino acids 86 to 344 of SEQ ID NO:58; amino acids 79 to 337 of SEQ ID NO:60; amino acids 78 to 336 of SEQ ID NO:62; amino acids 90 to 348 of SEQ ID NO:64; amino acids 56 to 314 of SEQ ID NO:66; amino acids 67 to 325 of SEQ ID NO:68; amino acids 81 to 339 of SEQ ID NO:70; and amino acids 83 to 341 of SEQ ID NO:72 and at least one EF hand domain having a sequence selected from the group consisting of amino acids 364 to 392 of SEQ ID NO:40; amino acids 416 to 444 of SEQ ID NO:42; amino acids 433 to 461 of SEQ ID NO:44; amino acids 384 to 412 of SEQ ID NO:46; amino acids 385 to 413 of SEQ ID NO:48; amino acids 433 to 461 of SEQ ID NO:50; amino acids 436 to 463 of SEQ ID NO:52; amino acids 418 to 446 of SEQ ID NO:54; amino acids 366 to 394 of SEQ ID NO:56; amino acids 391 to 419 of SEQ ID NO:58; amino acids 384 to 412 of SEQ ID NO:60; amino acids 418 to 446 of SEQ ID NO:62; amino acids 395 to 423 of SEQ ID NO:64; amino acids 372 to 400 of SEQ ID NO:68; amino acids 388 to 416 of SEQ ID NO:72; amino acids 452 to 480 of SEQ ID NO:42; amino acids 470 to 498 of SEQ ID NO:44; amino acids 420 to 448 of SEQ ID NO:46; amino acids 421 to 449 of SEQ ID NO:48; amino acids 470 to 498 of SEQ ID NO:50; amino acids 472 to 500 of SEQ ID NO:52; amino acids 455 to 483 of SEQ ID NO:54; amino acids 402 to 430 of SEQ ID NO:56; amino acids 427 to 455 of SEQ ID NO:58; amino acids 420 to 448 of SEQ ID NO:60; amino acids 454 to 482 of SEQ ID NO:62; amino acids 444 to 472 of SEQ ID NO:68; amino acids 460 to 488 of SEQ ID NO:72; amino acids 488 to 516 of SEQ ID NO:42; amino acids 512 to 540 of SEQ ID NO:44; amino acids 456 to 484 of SEQ ID NO:46; amino acids 457 to 485 of SEQ ID NO:48; amino acids 510 to 535 of SEQ ID NO:50; amino acids 512 to 537 of SEQ ID NO:52; amino acids 497 to 525 of SEQ ID NO:54; amino acids 438 to 466 of SEQ ID NO:56; amino acids 463 to 491 of SEQ ID NO:58; amino acids 456 to 484 of SEQ ID NO:60; amino acids 522 to 550 of SEQ ID NO:42; amino acids 546 to 570 of SEQ ID NO:44; amino acids 491 to 519 of SEQ ID NO:46; amino acids 492 to 520 of SEQ ID NO:48; amino acids 542 to 570 of SEQ ID NO:50; amino acids 542 to 570 of SEQ ID NO:52; amino acids 531 to 555 of SEQ ID NO:54; amino acids 474 to 502 of SEQ ID NO:56; amino acids 497 to 525 of SEQ ID NO:58; and amino acid 490 to 518 of SEQ ID NO:60; amino acids 489 to 517 of SEQ ID NO:62; amino acids 501 to 529 of SEQ ID NO:64; amino acids 470 to 498 of SEQ ID NO:66; amino acids 479 to 507 of SEQ ID NO:68; amino acids 492 to 520 of SEQ ID NO:70; and amino acids 495 to 523 of SEQ ID NO:72. More preferably, the transgenic plant of this embodiment comprises a polynucleotide encoding a calcium dependent protein kinase having a sequence comprising amino acids 1 to 418 of SEQ ID NO:40; amino acids 1 to 575 of SEQ ID NO:42; amino acids 1 to 590 of SEQ ID NO:44; amino acids 1 to 532 of SEQ ID NO:46; amino acids 1 to 528 of SEQ ID NO:48; amino acids 1 to 578 of SEQ ID NO:50; amino acids 1 to 580 of SEQ ID NO:52; amino acids 1 to 574 of SEQ ID NO:54; amino acids 1 to 543 of SEQ ID NO:56; amino acids 1 to 549 of SEQ ID NO:58; amino acids 1 to 544 of SEQ ID NO:60; amino acids 1 to 534 of SEQ ID NO:62; amino acids 1 to 549 of SEQ ID NO:64; amino acids 1 to 532 of SEQ ID NO:66; amino acids 1 to 525 of SEQ ID NO:68; amino acids 1 to 548 of SEQ ID NO:70; or amino acids 1 to 531 of SEQ ID NO:72.

[0073] In another embodiment, the invention provides a transgenic plant transformed with an expression cassette comprising an isolated polynucleotide encoding a cyclin dependent protein kinase. The transgenic plant of this embodiment may comprise any polynucleotide encoding a cyclin dependent protein kinase. Preferably, the transgenic plant of this embodiment comprises a polynucleotide encoding a full-length polypeptide having cyclin dependent protein kinase activity, wherein the polypeptide comprises a cyclin N terminal domain having a sequence selected from the group consisting of amino acids 59 to 190 of SEQ ID NO:74; amino acids 63 to 197 of SEQ ID NO:76; amino acids 73 to 222 of SEQ ID NO:78; and amino acids 54 to 186 of SEQ ID NO:80 and a cyclin C terminal domain having a sequence selected from the group consisting of amino acids 192 to 252 of SEQ ID NO:74; amino acids 199 to 259 of SEQ ID NO:76; amino acids 224 to 284 of SEQ ID NO:78; and amino acids 188 to 248 of SEQ ID NO:80. More preferably, the transgenic plant of this embodiment comprises a polynucleotide encoding a cyclin dependent protein kinase having a sequence comprising amino acids 1 to 355 of SEQ ID NO:74; amino acids 1 to 360 of SEQ ID NO:76; amino acids 1 to 399 of SEQ ID NO:78; or amino acids 1 to 345 of SEQ ID NO:80.

[0074] In one embodiment, the invention provides a transgenic plant transformed with an expression cassette comprising an isolated polynucleotide encoding phospholipid hydroperoxide glutathione peroxidase.

[0075] The transgenic plant of this embodiment may comprise any polynucleotide encoding a phospholipid hydroperoxide glutathione peroxidase. Preferably, the transgenic plant of this embodiment comprises a polynucleotide encoding glutathione peroxidase domain having a sequence comprising amino acids 9 to 117 of SEQ ID NO:102; amino acids 17 to 125 of SEQ ID NO:104; amino acids 79 to 187 of SEQ ID NO:106; amino acids 10 to 118 of SEQ ID NO:108; amino acids 12 to 120 of SEQ ID NO:110; amino acids 9 to 117 of SEQ ID NO:112; amino acids 9 to 117 of SEQ ID NO:114; amino acids 10 to 118 of SEQ ID NO:116; amino acids 9 to 117 of SEQ ID NO:118; amino acids 77 to 185 of SEQ ID NO:120; amino acids 12 to 120 of SEQ ID NO:122; amino acids 12 to 120 of SEQ ID NO:124; amino acids 12 to 120 of SEQ ID NO:126; amino acids 12 to 120 of SEQ ID NO:128; amino acids 10 to 118 of SEQ ID NO:130; amino acids 70 to 178 of SEQ ID NO:132; amino acids 10 to 118 of SEQ ID NO:134; amino acids 24 to 132 of SEQ ID NO:136. More preferably, the transgenic plant of this embodiment comprises a polynucleotide encoding a phospholipid hydroperoxide glutathione peroxidase having a sequence comprising amino acids 1 to 169 of SEQ ID NO:102; amino acids 1 to 175 of SEQ ID NO:104; amino acids 1 to 236 of SEQ ID NO:106; amino acids 1 to 169 of SEQ ID NO:108; amino acids 1 to 176 of SEQ ID NO:110; amino acids 1 to 166 of SEQ ID NO:112; amino acids 1 to 166 of SEQ ID NO:114; amino acids 1 to 167 of SEQ ID NO:116; amino acids 1 to 166 of SEQ ID NO:118; amino acids 1 to 234 of SEQ ID NO:120; amino acids 1 to 170 of SEQ ID NO:122; amino acids 1 to 170 of SEQ ID NO:124; amino acids 1 to 169 of SEQ ID NO:126; amino acids 1 to 169 of SEQ ID NO:128; amino acids 1 to 179 of SEQ ID NO:130; amino acids 1 to 227 of SEQ ID NO:132; amino acids 1 to 168 of SEQ ID NO:134; amino acids 1 to 182 of SEQ ID NO:136.

[0076] One embodiment of the invention is a transgenic plant transformed with an expression cassette comprising an isolated polynucleotide encoding a full-length polypeptide comprising a TCP family transcription factor domain having a sequence comprising amino acids 57 to 249 of SEQ ID NO:138; amino acids 54 to 237 of SEQ ID NO:140; amino acids 43 to 323 of SEQ ID NO:142; or amino acids 41 to 262 of SEQ ID NO:144. More preferably, the transgenic plant of this embodiment comprises a polynucleotide encoding a TCP family transcription factor protein having a sequence comprising amino acids 1 to 319 of SEQ ID NO:138; amino acids 1 to 311 of SEQ ID NO:140; amino acids 1 to 400 of SEQ ID NO:142; or amino acids 1 to 321 of SEQ ID NO:144.

[0077] In another embodiment, the invention provides a transgenic plant transformed with an expression cassette comprising an isolated polynucleotide encoding a full-length S6 kinase polypeptide comprising a kinase domain having a sequence comprising amino acids 124 to 379 of SEQ ID NO:146 amino acids 150 to 406 of SEQ ID NO:148 or amino acids 152 to 408 of SEQ ID NO:150 or, alternatively, a kinase C-terminal domain having a sequence comprising amino acids 399 to 444 of SEQ ID NO:146; amino acids 426 to 468 of SEQ ID NO:148; or amino acids 428 to 471 of SEQ ID NO:150. More preferably, the transgenic plant of this embodiment comprises a polynucleotide encoding a ribosomal protein S6 kinase having a sequence comprising amino acids 1 to 455 of SEQ ID NO:146; amino acids 1 to 479 of SEQ ID NO:148; or amino acids 1 to 481 of SEQ ID NO:150.

[0078] In another embodiment, the invention provides a transgenic plant transformed with an expression cassette comprising an isolated polynucleotide encoding CAAX amino terminal protease family protein comprising a CAAX amino terminal protease domain having a sequence comprising amino acids 255 to 345 of SEQ ID NO:158; amino acids 229 to 319 of SEQ ID NO:160; or amino acids 267 to 357 of SEQ ID NO:162. More preferably, the transgenic plant of this embodiment comprises a polynucleotide encoding a CAAX amino terminal protease family protein having a sequence comprising amino acids 1 to 347 of SEQ ID NO:158; amino acids 1 to 337 of SEQ ID NO:160; or amino acids 1 to 359 of SEQ ID NO:162.

[0079] In another embodiment, the invention provides a transgenic plant transformed with an expression cassette comprising an isolated polynucleotide encoding a DNA binding protein.

[0080] The transgenic plant of this embodiment may comprise any polynucleotide encoding a DNA binding protein comprising a metallopeptidase family M24 domain having a sequence comprising amino acids 21 to 296 of SEQ ID NO:164; amino acids 20 to 295 of SEQ ID NO:166; amino acids 20 to 295 of SEQ ID NO:168; amino acids 22 to 297 of SEQ ID NO:170; or amino acids 22 to 297 of SEQ ID NO:172. More preferably, the transgenic plant of this embodiment comprises a polynucleotide encoding a DNA binding protein having a sequence comprising amino acids 1 to 390 of SEQ ID NO:164; amino acids 1 to 390 of SEQ ID NO:166; amino acids 1 to 394 of SEQ ID NO:168; amino acids 1 to 392 of SEQ ID NO:170; or amino acids 1 to 394 of SEQ ID NO:172.

[0081] In another embodiment, the invention provides a transgenic plant transformed with an expression cassette comprising an isolated polynucleotide encoding rev interacting protein m is 3.

[0082] The transgenic plant of this embodiment may comprise any polynucleotide encoding a rev interacting protein mis3. Preferably, the transgenic plant of this embodiment comprises a polynucleotide encoding a rev interacting protein mis3 having a sequence comprising amino acids 1 to 390 of SEQ ID NO:176; amino acids 1 to 389 of SEQ ID NO:178; amino acids 1 to 391 of SEQ ID NO:180.

[0083] In another embodiment, the invention provides a transgenic plant transformed with an expression cassette comprising an isolated polynucleotide encoding a GRF1 interacting factor comprising an SSXT protein (N terminal region) domain having a sequence comprising amino acids 7 to 80 of SEQ ID NO:182; amino acids 7 to 80 of SEQ ID NO:184; amino acids 7 to 80 of SEQ ID NO:186; or amino acids 6 to 79 of SEQ ID NO:188. More preferably, the transgenic plant of this embodiment comprises a polynucleotide encoding a GRF1 interacting factor having a sequence comprising amino acids 1 to 212 of SEQ ID NO:182; amino acids 1 to 203 of SEQ ID NO:184; amino acids 1 to 212 of SEQ ID NO:186; amino acids 1 to 213 of SEQ ID NO:188.

[0084] In another embodiment, the invention provides a transgenic plant transformed with an expression cassette comprising an isolated polynucleotide encoding eukaryotic translation initiation factor 4A comprising a DEAD/DEAH box helicase domain having a sequence comprising amino acids 59 to 225 of SEQ ID NO:190; amino acids 64 to 230 of SEQ ID NO:192; amino acids 58 to 224 of SEQ ID NO:194; amino acids 64 to 230 of SEQ ID NO:196; amino acids 64 to 230 of SEQ ID NO:198; amino acids 64 to 230 of SEQ ID NO:200 or a helicase conserved C-terminal domain having a sequence comprising amino acids 293 to 369 of SEQ ID NO:190; amino acids 298 to 374 of SEQ ID NO:192; amino acids 292 to 368 of SEQ ID NO:194; amino acids 298 to 374 of SEQ ID NO:196; amino acids 298 to 374 of SEQ ID NO:198; amino acids 298 to 374 of SEQ ID NO:200. More preferably, the transgenic plant of this embodiment comprises a polynucleotide encoding a eukaryotic translation initiation factor 4A having a sequence comprising amino acids 1 to 408 of SEQ ID NO:190; amino acids 1 to 413 of SEQ ID NO:192; amino acids 1 to 407 of SEQ ID NO:194; amino acids 1 to 413 of SEQ ID NO:196; amino acids 1 to 413 of SEQ ID NO:198; amino acids 1 to 413 of SEQ ID NO:200.

[0085] In another embodiment, the invention provides a transgenic plant transformed with an expression cassette comprising an isolated polynucleotide encoding TGF beta receptor interacting protein comprising a WD domain, G-beta repeat having a sequence selected from the group consisting of amino acids 42 to 80 of SEQ ID NO:154; amino acids 42 to 80 of SEQ ID NO:156; and amino acids 42 to 80 of SEQ ID NO:152; or a WD domain, G-beta repeat having a sequence selected from the group consisting of amino acids 136 to 174 of SEQ ID NO:154; amino acids 136 to 174 of SEQ ID NO:156; and amino acids 136 to 174 of SEQ ID NO:152; or a WD domain, G-beta repeat having a sequence selected from the group consisting of amino acids 181 to 219 of SEQ ID NO:154; amino acids 181 to 219 of SEQ ID NO:156; and amino acids 181 to 219 of SEQ ID NO:152; or a WD domain, G-beta repeat having a sequence selected from the group consisting of amino acids 278 to 316 of SEQ ID NO:154; amino acids 278 to 316 of SEQ ID NO:156; and amino acids 278 to 316 of SEQ ID NO:152. More preferably, the transgenic plant of this embodiment comprises a polynucleotide encoding a TGF beta receptor interacting protein having a sequence comprising amino acids 1 to 326 of SEQ ID NO:154; amino acids 1 to 326 of SEQ ID NO:156; amino acids 1 to 326 of SEQ ID NO:152.

[0086] In one embodiment, the invention provides a transgenic plant transformed with an expression cassette comprising an isolated polynucleotide encoding an AP2 domain containing protein. The transgenic plant of this embodiment may comprise any polynucleotide encoding an AP2 domain containing protein. Preferably, the transgenic plant of this embodiment comprises a polynucleotide encoding an AP2 domain having a sequence comprising amino acids 44 to 99 of SEQ ID NO:208; amino acids 36 to 91 of SEQ ID NO:210; amino acids 59 to 115 of SEQ ID NO:212; amino acids 56 to 111 of SEQ ID NO:214; amino acids 32 to 87 of SEQ ID NO:216; amino acids 10 to 65 of SEQ ID NO:218; amino acids 40 to 95 of SEQ ID NO:220; amino acids 43 to 98 of SEQ ID NO:222; amino acids 63 to 118 of SEQ ID NO:224; amino acids 34 to 89 of SEQ ID NO:226; amino acids 37 to 92 of SEQ ID NO:228; amino acids 22 to 77 of SEQ ID NO:230; amino acids 14 to 69 of SEQ ID NO:232; amino acids 42 to 97 of SEQ ID NO:234; amino acids 78 to 133 of SEQ ID NO:236; amino acids 27 to 82 of SEQ ID NO:238; amino acids 45 to 100 of SEQ ID NO:240; amino acids 41 to 96 of SEQ ID NO:242; amino acids 25 to 80 of SEQ ID NO:244; amino acids 14 to 69 of SEQ ID NO:246; amino acids 22 to 77 of SEQ ID NO:248; amino acids 130 to 186 of SEQ ID NO:250; amino acids 22 to 77 of SEQ ID NO:252. More preferably, the transgenic plant of this embodiment comprises a polynucleotide encoding an AP2 domain containing protein having a sequence comprising amino acids 1 to 231 of SEQ ID NO:208; amino acids 1 to 217 of SEQ ID NO:210; amino acids 1 to 121 of SEQ ID NO:212; amino acids 1 to 203 of SEQ ID NO:214; amino acids 1 to 210 of SEQ ID NO:216; amino acids 1 to 177 of SEQ ID NO:218; amino acids 1 to 181 of SEQ ID NO:220; amino acids 1 to 245 of SEQ ID NO:222; amino acids 1 to 233 of SEQ ID NO:224; amino acids 1 to 254 of SEQ ID NO:226; amino acids 1 to 275 of SEQ ID NO:228; amino acids 1 to 213 of SEQ ID NO:230; amino acids 1 to 266 of SEQ ID NO:232; amino acids 1 to 205 of SEQ ID NO:234; amino acids 1 to 240 of SEQ ID NO:236; amino acids 1 to 157 of SEQ ID NO:238; amino acids 1 to 211 of SEQ ID NO:240; amino acids 1 to 259 of SEQ ID NO:242; amino acids 1 to 243 of SEQ ID NO:244; amino acids 1 to 191 of SEQ ID NO:246; amino acids 1 to 287 of SEQ ID NO:248; amino acids 1 to 273 of SEQ ID NO:250; amino acids 1 to 267 of SEQ ID NO:252.

[0087] In one embodiment, the invention provides a transgenic plant transformed with an expression cassette comprising an isolated polynucleotide encoding a brassinosteroid biosynthetic protein having a sequence comprising amino acids 1 to 566 of SEQ ID NO:254.

[0088] In another embodiment, the invention provides a transgenic plant transformed with an expression cassette comprising an isolated polynucleotide encoding a RING box protein having a sequence comprising amino acids 1 to 120 of SEQ ID NO:256.

[0089] In another embodiment, the invention provides a transgenic plant transformed with an expression cassette comprising an isolated polynucleotide encoding a serine/threonine protein phosphatase. The transgenic plant of this embodiment may comprise any polynucleotide encoding a serine/threonine-specific protein phosphatase. Serine/threonine-specific protein phosphatases contain the characteristic signature sequence [L/I/V/M/N][K/R]GNHE. All polypeptides described herein as being serine/threonine-specific protein phosphatases and provided in FIG. 15, contain this signature sequence. Preferably, the transgenic plant of this embodiment comprises a polynucleotide encoding a calcineurin-like phosphoesterase domain having a sequence comprising amino acids 44 to 239 of SEQ ID NO:258; amino acids 43 to 238 of SEQ ID NO:260; amino acids 54 to 249 of SEQ ID NO:262; amino acids 44 to 240 of SEQ ID NO:264; amino acids 43 to 238 of SEQ ID NO:266; amino acids 54 to 249 of SEQ ID NO:268; amino acids 48 to 243 of SEQ ID NO:270; amino acids 47 to 242 of SEQ ID NO:272; amino acids 54 to 249 of SEQ ID NO:274; amino acids 48 to 243 of SEQ ID NO:276; amino acids 47 to 242 of SEQ ID NO:278; amino acids 44 to 240 of SEQ ID NO:280; amino acids 47 to 242 of SEQ ID NO:282; amino acids 47 to 243 of SEQ ID NO:284; or amino acids 60 to 255 of SEQ ID NO:286. More preferably, the transgenic plant of this embodiment comprises a polynucleotide encoding a serine/threonine protein phosphatase having a sequence comprising amino acids 1 to 304 of SEQ ID NO:258; amino acids 1 to 303 of SEQ ID NO:260; amino acids 1 to 305 of SEQ ID NO:262; amino acids 1 to 313 of SEQ ID NO:264; amino acids 1 to 306 of SEQ ID NO:266; amino acids 1 to 306 of SEQ ID NO:268; amino acids 1 to 308 of SEQ ID NO:270; amino amino acids 1 to 314 of SEQ ID NO:272; amino acids 1 to 306 of SEQ ID NO:274; amino acids 1 to 313 of SEQ ID NO:276; amino acids 1 to 305 of SEQ ID NO:278; amino acids 1 to 303 of SEQ ID NO:280; amino acids 1 to 313 of SEQ ID NO:282; amino acids 1 to 307 of SEQ ID NO:284; or amino acids 1 to 306 of SEQ ID NO:286.

[0090] In another embodiment, the invention provides a transgenic plant transformed with an expression cassette comprising an isolated polynucleotide encoding a serine/threonine-specific protein kinase. All polypeptides listed herein as being a serine/threonine-specific protein kinases contain the characteristic active-site signature sequence, of which the sequence, HRDLKLEN, is common to the polypeptides aligned in FIG. 4. The transgenic plant of this embodiment may comprise any polynucleotide encoding a serine/threonine-specific protein kinase. Preferably, the transgenic plant of this embodiment comprises a polynucleotide encoding a full-length polypeptide having serine/threonine-specific protein kinase activity, wherein the polypeptide comprises a domain selected from the group consisting of a domain having a sequence comprising amino acids 15 to 271 of SEQ ID NO:82; amino acids 4 to 260 of SEQ ID NO:84; amino acids 4 to 260 of SEQ ID NO:86; amino acids 18 to 274 of SEQ ID NO:88; amino acids 23 to 279 of SEQ ID NO:90; amino acids 5 to 261 of SEQ ID NO:92; amino acids 23 to 279 of SEQ ID NO:94; amino acids 4 to 260 of SEQ ID NO:96; amino acids 12 to 268 of SEQ ID NO:98; and amino acids 4 to 260 of SEQ ID NO:100. More preferably, the transgenic plant of this embodiment comprises a polynucleotide encoding a serine/threonine-specific protein kinase having a sequence comprising amino acids 1 to 348 of SEQ ID NO:82; amino acids 1 to 364 of SEQ ID NO:84; amino acids 1 to 354 of SEQ ID NO:86; amino acids 1 to 359 of SEQ ID NO:88; amino acids 1 to 360 of SEQ ID NO:90; amino acids 1 to 336 of SEQ ID NO:92; amino acids 1 to 362 of SEQ ID NO:94; amino acids 1 to 370 of SEQ ID NO:96; amino acids 1 to 350 of SEQ ID NO:98; or amino acids 1 to 361 of SEQ ID NO:100.

[0091] In one embodiment, the invention provides a transgenic plant transformed with an expression cassette comprising, in operative association, an isolated polynucleotide encoding a promoter capable of enhancing gene expression in leaves; and an isolated polynucleotide encoding a full-length polypeptide which is a subunit of acyl-CoA synthetase;

wherein the transgenic plant demonstrates increased yield as compared to a wild type plant of the same variety which does not comprise the expression cassette. As indicated in FIG. 16, acyl-CoA synthetase mediates the activation of long-chain fatty acids for synthesis of cellular lipids. In prokaryotes, the acyl CoA synthetase holoenzyme is a multimer of long-chain-fatty-acid-CoA ligase subunits. These ligase subunits of acyl-CoA synthetase are characterized, in part, by the presence of a cAMP binding domain signature sequence. Such signature sequences are exemplified in the long-chain-fatty-acid-CoA ligase proteins set forth in FIG. 17.

[0092] The transgenic plant of this embodiment may comprise any polynucleotide encoding an acyl-CoA synthetase long-chain-fatty-acid-CoA ligase subunit. Preferably, the transgenic plant of this embodiment comprises a polynucleotide encoding a full-length polypeptide having acyl-CoA synthetase long-chain-fatty-acid-CoA ligase subunit activity, wherein the polypeptide comprises a cAMP binding domain signature sequence selected from the group consisting of amino acids 213 to 543 of SEQ ID NO:288; amino acids 299 to 715 of SEQ ID NO:290; amino acids 173 to 504 of SEQ ID NO:292; amino acids 124 to 457 of SEQ ID NO:294; amino acids 178 to 509 of SEQ ID NO:296; amino acids 82 to 424 of SEQ ID NO:298; amino acids 207 to 388 of SEQ ID NO:300; amino acids 215 to 561 of SEQ ID NO:302; amino acids 111 to 476 of SEQ ID NO:304; amino acids 206 to 544 of SEQ ID NO:306; amino acids 192 to 531 of SEQ ID NO:308; amino acids 191 to 528 of SEQ ID NO:310; amino acids 259 to 660 of SEQ ID NO:312; amino acids 234 to 642 of SEQ ID NO:314; and amino acids 287 to 707 of SEQ ID NO:316. Most preferably, the transgenic plant of this embodiment comprises a polynucleotide encoding a long-chain-fatty-acid-CoA ligase subunit of acyl-CoA synthetase having a sequence comprising amino acids 1 to 561 of SEQ ID NO:288; amino acids 1 to 744 of SEQ ID NO:290; amino acids 1 to 518 of SEQ ID NO:292; amino acids 1 to 471 of SEQ ID NO:294; amino acids 1 to 523 of SEQ ID NO:296; amino acids 1 to 442 of SEQ ID NO:298; amino acids 1 to 555 of SEQ ID NO:300; amino acids 1 to 582 of SEQ ID NO:302; amino acids 1 to 455 of SEQ ID NO:304; amino acids 1 to 562 of SEQ ID NO:306; amino acids 1 to 547 of SEQ ID NO:308; amino acids 1 to 546 of SEQ ID NO:310; amino acids 1 to 691 of SEQ ID NO:312; amino acids 1 to 664 of SEQ ID NO:314; or amino acids 1 to 726 of SEQ ID NO:316.

[0093] In another embodiment, the invention provides a transgenic plant transformed with an expression cassette comprising, in operative association, an isolated polynucleotide encoding a promoter capable of enhancing gene expression in leaves and an isolated polynucleotide encoding a full-length beta-ketoacyl-ACP synthase polypeptide, wherein the transgenic plant demonstrates increased yield as compared to a wild type plant of the same variety which does not comprise the expression cassette. The beta-ketoacyl-ACP synthase enzyme is active in initiating fatty acid biosynthesis and has acetyl CoA:ACP transacylase activity. It selectively catalyzes the formation of acetoacetyl-ACP and specifically uses CoA thioesters rather than acyl-ACP as the primer. The enzyme has a role in feedback regulation of fatty acid synthesis. The transgenic plant of this embodiment may comprise any polynucleotide encoding a beta-ketoacyl-ACP synthase polypeptide. Preferably, the beta-ketoacyl-ACP synthase polypeptide employed in this embodiment of the invention comprises amino acids 1 to 317 of SEQ ID NO:318.

[0094] The first committed step in fatty acid biosynthesis is the conversion of acetyl-CoA to malonyl-CoA by the enzyme acetyl CoA carboxylase (ACC). Subsequent steps include the elongation reactions with two carbon donations to the chain from malonyl-CoA. The activity of ACC is regulated by phosphorylation and dephosphorylation in eukaryotes and as well has allosteric regulation by metabolites such as citrate. In prokaryotes, ACCs are multi-subunit enzymes consisting of a carboxyl transferase designated ACC alpha, a biotin-dependent carboxylase, and biotin carboxyl carrier protein, whereas eukaryotic ACCs are multidomain enzymes. Most plants have both forms of ACCs, with the prokaryotic-like form in plastids, and the eukaryotic-like form in the cytosol. Plant mitochondria are thought to lack ACC activity and to synthesize fatty acids from malonyl CoA. Subcellular compartmentalization of the enzymes involved in fatty acid metabolism is an important determinant of the final end products produced.

[0095] In another embodiment, the invention provides a transgenic plant transformed with an expression cassette comprising, in operative association, an isolated polynucleotide encoding a promoter capable of enhancing gene expression in leaves; an isolated polynucleotide encoding a mitochondrial transit peptide; and an isolated polynucleotide encoding a subunit of an acetyl-CoA carboxylase complex, wherein the transgenic plant demonstrates increased yield as compared to a wild type plant of the same variety which does not comprise the expression cassette. In accordance with the invention, the ACC subunit employed in this embodiment may be an ACC alpha, a biotin-dependent carboxylase, or a biotin carboxyl carrier protein. The transgenic plant of this embodiment may comprise any polynucleotide encoding an ACC alpha, a biotin-dependent carboxylase, or biotin carboxyl carrier protein which is a subunit of ACC.

[0096] When the subunit is ACC alpha, it preferably comprises amino acids 1 to 319 of SEQ ID NO:320.

[0097] When the ACC subunit is a biotin-dependent carboxylase, it is characterized, in part, by the presence of a carbamoyl-phosphate synthase subdomain signature sequence. Such signature sequences are exemplified in the biotin-dependent carboxylases set forth in FIG. 18. In accordance with the invention, the biotin-dependent carboxylase of this embodiment comprises a domain selected from the group consisting of amino acids 3 to 308 of SEQ ID NO:322; amino acids 73 to 378 of SEQ ID NO:324; amino acids 38 to 344 of SEQ ID NO:326; and amino acids 73 to 378 of SEQ ID NO:328. More preferably, the biotin-dependent carboxylase of this embodiment comprises amino acids 1 to 449 of SEQ ID NO:322; amino acids 1 to 535 of SEQ ID NO:324; amino acids 1 to 732 of SEQ ID NO:326; or amino acids 1 to 539 of SEQ ID NO:328.

[0098] When the ACC subunit is a biotin carboxyl carrier protein, it is characterized, in part, by the presence of a signature sequence surrounding an M-K dipeptide sequence, of which the lysine residue is the biotin attachment site. Such signature sequences are exemplified in the biotin carboxyl carrier proteins set forth in FIG. 19. In accordance with the invention, the biotin carboxyl carrier protein of this embodiment comprises a domain selected from the group consisting of amino acids 79 to 152 of SEQ ID NO:330; amino acids 204 to 277 of SEQ ID NO:332; and amino acids 37 to 110 of SEQ ID NO:334. More preferably, the biotin carboxyl carrier protein subunit of this embodiment comprises amino acids 1 to 156 of SEQ ID NO:330; amino acids 1 to 282 of SEQ ID NO:332; or amino acids 1 to 115 of SEQ ID NO:334.

[0099] In another embodiment, the invention provides a transgenic plant transformed with an expression cassette comprising, in operative association, an isolated polynucleotide encoding a promoter capable of enhancing gene expression in leaves; an isolated polynucleotide encoding a mitochondrial transit peptide; and an isolated polynucleotide encoding a full-length 3-oxoacyl-[ACP] synthase II polypeptide; wherein the transgenic plant demonstrates increased yield as compared to a wild type plant of the same variety which does not comprise the expression cassette. The 3-oxoacyl-ACP synthase II enzymes belong to the class of beta-ketoacyl synthases, which first transfer the acyl component of an activated acyl primer to the highly conserved, active-site cysteine residue of the enzyme and then catalyze a condensation reaction with an activated malonyl donor, concomitantly releasing carbon dioxide. The 3-oxoacyl-ACP synthase II enzymes contain a conserved signature sequence which surrounds the active-site cysteine residue. Such signature sequences are exemplified in the 3-oxoacyl-ACP synthase II proteins set forth in FIG. 20.

[0100] The transgenic plant of this embodiment may comprise any polynucleotide encoding a 3-oxoacyl-ACP synthase II. Preferably, the transgenic plant of this embodiment comprises a polynucleotide encoding a full-length polypeptide having 3-oxoacyl-ACP synthase II activity, wherein the polypeptide comprises a domain selected from the group consisting of amino acids 12 to 410 of SEQ ID NO:336; amino acids 2 to 401 of SEQ ID NO:338; amino acids 55 to 456 of SEQ ID NO:340; amino acids 2 to 401 of SEQ ID NO:342. More preferably, the transgenic plant of this embodiment comprises a polynucleotide encoding a 3-oxoacyl-ACP synthase II comprising amino acids 1 to 413 of SEQ ID NO:336; amino acids 1 to 406 of SEQ ID NO:338; amino acids 1 to 461 of SEQ ID NO:340; amino acids 1 to 406 of SEQ ID NO:342.

[0101] In another embodiment, the invention provides a transgenic plant transformed with an expression cassette comprising, in operative association, an isolated polynucleotide encoding a promoter and an isolated polynucleotide encoding a full-length 3-oxoacyl-[ACP] reductase polypeptide; wherein the transgenic plant demonstrates increased yield as compared to a wild type plant of the same variety which does not comprise the expression cassette. The promoter employed in the expression vector of this embodiment may optionally be capable of enhancing expression in leaves. Moreover, the expression vector of this embodiment may optionally comprise a mitochondrial or chloroplast transit peptide.

[0102] Predicted domains of 3-oxoacyl-[ACP] reductase polypeptides include a short chain dehydrogenase (PF00106) domain. Short chain dehydrogenases are a large family of enzymes, many of which are NAD- or NADP-dependent oxidoreductases. Most dehydrogenases have two domains, one to bind the coenzyme, e.g. NAD, and the second domain to bind the substrate, which determines substrate specificity, and contains amino acids involved in catalysis. Within the coenzyme binding domain there is little primary sequence similarity, although structural similarity has been found. However, a signature sequence of short-chain dehydrogenases, which includes a YxxxK motif, has been identified. Such signature sequences are exemplified in the 3-oxoacyl-[ACP] reductase proteins set forth in FIG. 21.

[0103] The transgenic plant of this embodiment may comprise any polynucleotide encoding a 3-oxoacyl-ACP reductase. Preferably, the transgenic plant of this embodiment comprises a polynucleotide encoding a full-length polypeptide having 3-oxoacyl-ACP reductase activity, wherein the polypeptide comprises a domain selected from the group consisting of a domain having a sequence comprising amino acids 80 to 181 of SEQ ID NO:344; amino acids 85 to 186 of SEQ ID NO:346; amino acids 79 to 180 of SEQ ID NO:348; amino acids 69 to 170 of SEQ ID NO:350; amino acids 51 to 154 of SEQ ID NO:352; amino acids 156 to 257 of SEQ ID NO:354; amino acids 90 to 193 of SEQ ID NO:356; amino acids 81 to 184 of SEQ ID NO:358; amino acids 128 to 228 of SEQ ID NO:360; amino acids 96 to 197 of SEQ ID NO:362; amino acids 97 to 198 of SEQ ID NO:364; amino acids 95 to 198 of SEQ ID NO:366; amino acids 103 to 208 of SEQ ID NO:368; amino acids 103 to 208 of SEQ ID NO:370; amino acids 100 to 203 of SEQ ID NO:372; amino acids 96 to 197 of SEQ ID NO:374; amino acids 96 to 197 of SEQ ID NO:376; amino acids 89 to 192 of SEQ ID NO:378; amino acids 159 to 260 of SEQ ID NO:380; amino acids 88 to 187 of SEQ ID NO:382; amino acids 148 to 249 of SEQ ID NO:384; amino acids 98 to 202 of SEQ ID NO:386; amino acids 95 to 199 of SEQ ID NO:388; amino acids 154 to 257 of SEQ ID NO:390; amino acids 88 to 187 of SEQ ID NO:392; amino acids 100 to 201 of SEQ ID NO:394; and amino acids 88 to 187 of SEQ ID NO:396. More preferably, the transgenic plant of this embodiment comprises a polynucleotide encoding a 3-oxoacyl-ACP reductase having a sequence comprising amino acids 1 to 244 of SEQ ID NO:344; amino acids 1 to 247 of SEQ ID NO:346; amino acids 1 to 253 of SEQ ID NO:348; amino acids 1 to 243 of SEQ ID NO:350; amino acids 1 to 236 of SEQ ID NO:352; amino acids 1 to 320 of SEQ ID NO:354; amino acids 1 to 275 of SEQ ID NO:356; amino acids 1 to 260 of SEQ ID NO:358; amino acids 1 to 294 of SEQ ID NO:360; amino acids 1 to 267 of SEQ ID NO:362; amino acids 1 to 272 of SEQ ID NO:364; amino acids 1 to 280 of SEQ ID NO:366; amino acids 1 to 282 of SEQ ID NO:368; amino acids 1 to 282 of SEQ ID NO:370; amino acids 1 to 265 of SEQ ID NO:372; amino acids 1 to 264 of SEQ ID NO:374; amino acids 1 to 271 of SEQ ID NO:376; amino acids 1 to 256 of SEQ ID NO:378; amino acids 1 to 323 of SEQ ID NO:380; amino acids 1 to 249 of SEQ ID NO:382; amino acids 1 to 312 of SEQ ID NO:384; amino acids 1 to 246 of SEQ ID NO:386; amino acids 1 to 258 of SEQ ID NO:388; amino acids 1 to 320 of SEQ ID NO:390; amino acids 1 to 253 of SEQ ID NO:392; amino acids 1 to 273 of SEQ ID NO:394; or amino acids 1 to 253 of SEQ ID NO:396.

[0104] In another embodiment, the invention provides a transgenic plant transformed with an expression cassette comprising, in operative association, an isolated polynucleotide encoding a promoter, an isolated polynucleotide encoding a mitochondrial transit peptide, and an isolated polynucleotide encoding a full-length biotin synthetase polypeptide, wherein the transgenic plant demonstrates increased yield as compared to a wild type plant of the same variety which does not comprise the expression cassette.

[0105] Biotin synthetases catalyze the last step of biotin biosynthesis, converting 9-mercaptothiobiotin to biotin. The structure of biotin synthetases includes a predicted radical SAM superfamily domain (PF04055). These domains in the radical SAM superfamily are important in catalyzing diverse reactions including unusual methylations, isomerization, sulphur insertion, ring formation, anaerobic oxidation and protein radical formation. Evidence exists that these proteins generate a radical species by reductive cleavage of S-adenosylmethionine (SAM) through an unusual Fe—S center. Three cysteine residues arranged in a CxxxCxxC pattern are an essential component of such Fe—S centers. All polypeptides listed herein as have this predicted motif as a part of their predicted radical SAM superfamily domain. Such signature sequences are exemplified in the biotin sythetase proteins set forth in FIG. 22.

[0106] The transgenic plant of this embodiment may comprise any polynucleotide encoding a biotin synthetase. Preferably, the transgenic plant of this embodiment comprises a polynucleotide encoding a full-length polypeptide having biotin synthetase activity, wherein the polypeptide comprises a domain selected from the group consisting of a domain having a sequence comprising amino acids 78 to 300 of SEQ ID NO:398; amino acids 82 to 301 of SEQ ID NO:400; and amino acids 79 to 298 of SEQ ID NO:402. More preferably, the transgenic plant of this embodiment comprises a polynucleotide encoding a biotin synthetase having a sequence comprising amino acids 1 to 362 of SEQ ID NO:398; amino acids 1 to 304 of SEQ ID NO:400; or amino acids 1 to 372 of SEQ ID NO:402.

[0107] The invention further provides a seed which is true breeding for the expression cassettes (also referred to herein as “transgenes”) described herein, wherein transgenic plants grown from said seed demonstrate increased yield as compared to a wild type variety of the plant. The invention also provides a product produced by or from the transgenic plants expressing the polynucleotide, their plant parts, or their seeds. The product can be obtained using various methods well known in the art. As used herein, the word “product” includes, but not limited to, a foodstuff, feedstuff, a food supplement, feed supplement, fiber, cosmetic or pharmaceutical. Foodstuffs are regarded as compositions used for nutrition or for supplementing nutrition. Animal feedstuffs and animal feed supplements, in particular, are regarded as foodstuffs. The invention further provides an agricultural product produced by any of the transgenic plants, plant parts, and plant seeds. Agricultural products include, but are not limited to, plant extracts, proteins, amino acids, carbohydrates, fats, oils, polymers, vitamins, and the like.

[0108] The invention also provides an isolated polynucleotide which has a sequence selected from the group consisting of SEQ ID NO:291; SEQ ID NO:293; SEQ ID NO:295; SEQ ID NO:297; SEQ ID NO:299; SEQ ID NO:301; SEQ ID NO:303; SEQ ID NO:311; SEQ ID NO:313; SEQ ID NO:315; SEQ ID NO:331; SEQ ID NO:333; SEQ ID NO:337; SEQ ID NO:339; SEQ ID NO:341; SEQ ID NO:347; SEQ ID NO:349; SEQ ID NO:351; SEQ ID NO:353; SEQ ID NO:355; SEQ ID NO:357; SEQ ID NO:359; SEQ ID NO:361; SEQ ID NO:363; SEQ ID NO:365; SEQ ID NO:367; SEQ ID NO:369; SEQ ID NO:371; SEQ ID NO:373; SEQ ID NO:375; SEQ ID NO:377; SEQ ID NO:379; SEQ ID NO:383; SEQ ID NO:385; SEQ ID NO:387; SEQ ID NO:389; SEQ ID NO:391; SEQ ID NO:393; SEQ ID NO:395; SEQ ID NO:399; and SEQ ID NO:401. Also encompassed by the isolated polynucleotide of the invention is an isolated polynucleotide encoding a polypeptide having an amino acid sequence selected from the group consisting of SEQ ID NO:292; SEQ ID NO:294; SEQ ID NO:296; SEQ ID NO:298; SEQ ID NO:300; SEQ ID NO:302; SEQ ID NO:304; SEQ ID NO:312; SEQ ID NO:314; SEQ ID NO:316; SEQ ID NO:332; SEQ ID NO:334; SEQ ID NO:338; SEQ ID NO:340; SEQ ID NO:342; SEQ ID NO:348; SEQ ID NO:350; SEQ ID NO:352; SEQ ID NO:354; SEQ ID NO:356; SEQ ID NO:358; SEQ ID NO:360; SEQ ID NO:362; SEQ ID NO:364; SEQ ID NO:366; SEQ ID NO:368; SEQ ID NO:370; SEQ ID NO:372; SEQ ID NO:374; SEQ ID NO:376; SEQ ID NO:378; SEQ ID NO:380; SEQ ID NO:384; SEQ ID NO:386; SEQ ID NO:388; SEQ ID NO:390; SEQ ID NO:392; SEQ ID NO:394; SEQ ID NO:396; SEQ ID NO:400; and SEQ ID NO:402. A polynucleotide of the invention can be isolated using standard molecular biology techniques and the sequence information provided herein, for example, using an automated DNA synthesizer.

[0109] In one embodiment, the invention provides a transgenic plant transformed with an expression cassette comprising, in operative association, an isolated polynucleotide encoding a promoter capable of enhancing gene expression in leaves; an isolated polynucleotide encoding a mitochondrial transit peptide; and polynucleotide encoding a full-length FPS polypeptide, wherein the transgenic plant demonstrates increased yield as compared to a wild type plant of the same variety which does not comprise the expression cassette.

[0110] Gene B0421 (SEQ ID NO:414) and gene YJL167W (SEQ ID NO:416) encode FPS. As indicated in FIG. 23, FPS catalyzes the synthesis of farnesyl diphosphate (an important precursor of sterols and terpenoids) from isopentenyl diphosphate and dimethylallyl diphosphate. Previous reports on high expression of FPS in A. thaliana plants indicated that the gene caused a cell death/senescence-like phenotype with less-vigorous growth compared to wild-type plants, with the onset and severity of the phenotype corresponding to the level of FPS activity. A. thaliana has two genes encoding three isoforms of farnesyl diphosphate synthase: FPS1L, FPS1S, and FPS2. When FPS1L is targeted to the mitochondria in Arabidopsis, chlorosis and cell death under continuous light occur. This overexpression in mitochondria causes an altered leaf cytokinin profile, and renders the plant more sensitive to oxidative stress induced by continuous light.

[0111] In contrast to these published observations, we observed that if gene B0421 (SEQ ID NO:414) was expressed under control of the USP promoter and the protein was targeted to the mitochondria, the plants were larger under water limiting growth conditions. Moreover, if gene YJL167W (SEQ ID NO:416) was expressed under control of the USP promoter and the protein was targeted to the mitochondria, the plants were larger under well watered growth conditions.

[0112] The transgenic plant of this embodiment may comprise any polynucleotide encoding an FPS polypeptide. A predicted domain of FPS proteins is a polyprenyl synthetase (PF00348). The polyprenyl synthetase domain is characterized, in part, by the presence of two signature sequences. Such signature sequences are exemplified in the FPS proteins set forth in FIG. 24. Preferably, the transgenic plant of this embodiment comprises a polynucleotide encoding a full-length polypeptide having FPS activity, wherein the polypeptide comprises a polyprenyl synthetase domain comprising a pair of signature sequences, wherein one member of the pair is selected from the group consisting of amino acids 81 to 125 of SEQ ID NO:414; amino acids 97 to 139 of SEQ ID NO:416; amino acids 76 to 120 of SEQ ID NO:418; amino acids 116 to 160 of SEQ ID NO:420; amino acids 90 to 132 of SEQ ID NO:422; amino acids 7 to 51 of SEQ ID NO:424; amino acids 46 to 90 of SEQ ID NO:426; amino acids 7 to 49 of SEQ ID NO:428; amino acids 19 to 61 of SEQ ID NO:430; amino acids 7 to 49 of SEQ ID NO:432; and amino acids 98 to 140 of SEQ ID NO:434; and the other member of the pair of signature sequences is selected from the group consisting of amino acids 193 to 227 of SEQ ID NO:414; amino acids 210 to 244 of SEQ ID NO:416; amino acids 191 to 224 of SEQ ID NO:418; amino acids 224 to 257 of SEQ ID NO:420; amino acids 203 to 236 of SEQ ID NO:422; amino acids 115 to 148 of SEQ ID NO:424; amino acids 158 to 191 of SEQ ID NO:426; amino acids 108 to 141 of SEQ ID NO:428; amino acids 132 to 165 of SEQ ID NO:430; amino acids 108 to 141 of SEQ ID NO:432; and amino acids 211 to 244 of SEQ ID NO:434. Most preferably, the transgenic plant of this embodiment comprises a polynucleotide encoding an FPS polypeptide having a sequence comprising amino acids 1 to 299 of SEQ ID NO:414; amino acids 1 to 352 of SEQ ID NO:416; amino acids 1 to 294 of SEQ ID NO:418; amino acids 1 to 274 of SEQ ID NO:420; amino acids 1 to 342 of SEQ ID NO:422; amino acids 1 to 222 of SEQ ID NO:424; amino acids 1 to 261 of SEQ ID NO:426; amino acids 1 to 161 of SEQ ID NO:428; amino acids 1 to 174 of SEQ ID NO:430; amino acids 1 to 245 of SEQ ID NO:432; or amino acids 1 to 350 of SEQ ID NO:434.

[0113] In another embodiment, the invention provides a transgenic plant transformed with an expression cassette comprising, in operative association, an isolated polynucleotide encoding a promoter capable of enhancing gene expression in leaves, an isolated polynucleotide encoding a chloroplast transit peptide, and an isolated polynucleotide encoding a full-length squalene synthase polypeptide, wherein the transgenic plant demonstrates increased yield as compared to a wild type plant of the same variety which does not comprise the expression cassette. Gene SQS1 (SEQ ID NO:436) encodes SQS, which catalyzes the conversion of two molecules of farnesyl diphosphate into squalene, which is the first committed step in sterol biosynthesis.

[0114] The transgenic plant of this embodiment may comprise any polynucleotide encoding a SQS polypeptide. Preferably, the transgenic plant of this embodiment comprises a polynucleotide encoding a full-length polypeptide having SQS activity, wherein the polypeptide comprises a squalene synthetase domain which comprises a pair of SQS signature sequences. Such signature sequences are exemplified in the SQS polypeptides set forth in FIG. 25. Preferably, the polynucleotide encodes a SQS polypeptide comprising a squalene synthetase domain comprising a pair of signature sequences, wherein one member of the pair has a sequence selected from the group consisting of amino acids 201 to 216 of SEQ ID NO:436; amino acids 201 to 216 of SEQ ID NO:438; amino acids 168 to 183 of SEQ ID NO:440; amino acids 168 to 183 of SEQ ID NO:442; and amino acids 164 to 179 of SEQ ID NO:444; and the other member of the pair of signature sequences has a sequence selected from the group consisting of amino acids 234 to 262 of SEQ ID NO:436; amino acids 234 to 262 of SEQ ID NO:438; amino acids 203 to 231 of SEQ ID NO:440; amino acids 201 to 229 of SEQ ID NO:442; and amino acids 197 to 225 of SEQ ID NO:444. More preferably, the polynucleotide encodes a SQS polypeptide comprising a squalene synthetase domain selected from the group consisting of amino acids 95 to 351 of SEQ ID NO:436; amino acids 95 to 351 of SEQ ID NO:438; amino acids 62 to 320 of SEQ ID NO:440; amino acids 62 to 318 of SEQ ID NO:442; and amino acids 58 to 314 of SEQ ID NO:444. Most preferably, the polynucleotide encodes a SQS polypeptide comprising amino acids 1 to 436 of SEQ ID NO:436; amino acids 1 to 436 of SEQ ID NO:438; amino acids 1 to 357 of SEQ ID NO:440; amino acids 1 to 413 of SEQ ID NO:442; or amino acids 1 to 401 of SEQ ID NO:444.

[0115] In another embodiment, the invention provides a transgenic plant transformed with an expression cassette comprising, in operative association, an isolated polynucleotide encoding a promoter capable of enhancing gene expression in leaves; an isolated polynucleotide encoding a mitochondrial transit peptide; and an isolated polynucleotide encoding a full-length squalene epoxidase polypeptide; wherein the transgenic plant demonstrates increased yield as compared to a wild type plant of the same variety which does not comprise the expression cassette. Gene YGR175C (SEQ ID NO:446) encodes squalene epoxidase, which catalyzes the first oxygenation step in sterol biosynthesis, the conversion of squalene into oxidosqualene, a precursor of cyclic triterpenoids such as membrane sterols, brassinosteroid phytohormones, and non-steroidal triterpenoids. Squalene epoxidase may be one of the rate-limiting steps in this pathway. Like other flavin-dependent enzymes, squalene epoxidase enzymes are characterized, in part, by the presence of a flavin adenine dinucleotide (FAD) cofactor binding domain and a substrate-binding domain. The active site is at the interface of these two domains. These domains are characterized by two distinctive sequence motifs. One of these motifs forms a loop at the interface between the FAD and the substrate-binding domains and has the sequence, D-R-I-v-G-E-I-m-Q-P-g-G (SEQ ID NO:461) in YGR175C (SEQ ID NO:446). Those amino acid residues represented in uppercase are highly conserved among squalene epoxidases. The other motif, G-D-x-x-N-M-R-H-P-1-t-g-g-G-M-t-V (SEQ ID NO:462), includes an FAD binding site (334GD335) and part of the potential substrate binding residues identified in squalene epoxidase from rat. This motif also forms a loop near the FAD cofactor at the interface between the two squalene epoxidase domains and is located opposite to the first motif. Such conserved motifs are exemplified in the squalene epoxidase proteins set forth in FIG. 26.

[0116] The transgenic plant of this embodiment may comprise any polynucleotide encoding a squalene epoxidase. Preferably, the transgenic plant of this embodiment comprises a polynucleotide encoding a full-length polypeptide having squalene epoxidase activity, wherein the polypeptide comprises a domain comprising a pair of FAD-dependent enzyme motifs, wherein one member of the pair has a sequence selected from the group consisting of amino acids 55 to 66 of SEQ ID NO:446; amino acids 79 to 90 of SEQ ID NO:448; and amino acids 98 to 109 of SEQ ID NO:450; and the other member of the pair has a sequence selected from the group consisting of amino acids 334 to 350 of SEQ ID NO:446; amino acids 331 to 347 of SEQ ID NO:448; and amino acids 347 to 363 of SEQ ID NO:450. More preferably, the polynucleotide encodes a a full-length polypeptide having squalene epoxidase activity, wherein the polypeptide comprises a domain selected from the group consisting of amino acids 20 to 488 of SEQ ID NO:446; amino acids 44 to 483 of SEQ ID NO:448; or amino acids 63 to 500 of SEQ ID NO:450. Most preferably, the transgenic plant of this embodiment comprises a polynucleotide encoding a squalene epoxidase comprising amino acids 1 to 496 of SEQ ID NO:446; amino acids 1 to 512 of SEQ ID NO:448; or amino acids 1 to 529 of SEQ ID NO:450.

[0117] The invention also provides an isolated polynucleotide which has a sequence selected from the group consisting of SEQ ID NO:417; SEQ ID NO:419; SEQ ID NO:421; SEQ ID NO:423; SEQ ID NO:425; SEQ ID NO:427; SEQ ID NO:429; SEQ ID NO:431; SEQ ID NO:435; SEQ ID NO:437; SEQ ID NO:439; SEQ ID NO:447; and SEQ ID NO:449. Also encompassed by the isolated polynucleotide of the invention is an isolated polynucleotide encoding a polypeptide having an amino acid sequence selected from the group consisting of SEQ ID NO:418; SEQ ID NO:420; SEQ ID NO:422; SEQ ID NO:424; SEQ ID NO:426; SEQ ID NO:428; SEQ ID NO:430; SEQ ID NO:432; SEQ ID NO:436; SEQ ID NO:438; SEQ ID NO:440; SEQ ID NO:448; and SEQ ID NO:450. A polynucleotide of the invention can be isolated using standard molecular biology techniques and the sequence information provided herein, for example, using an automated DNA synthesizer.

[0118] The invention further provides a recombinant expression vector which comprises an expression cassette selected from the group consisting of a) an expression cassette comprising, in operative association, an isolated polynucleotide encoding a promoter capable of enhancing gene expression in leaves; an isolated polynucleotide encoding a mitochondrial transit peptide; and an isolated polynucleotide encoding a full-length FPS polypeptide; b) an expression cassette comprising, in operative association, an isolated polynucleotide encoding a promoter capable of enhancing gene expression in leaves; and an isolated polynucleotide encoding a full-length SQS polypeptide; and c) an expression cassette comprising in operative association, an isolated polynucleotide encoding a promoter capable of enhancing gene expression in leaves; an isolated polynucleotide encoding a chloroplast transit peptide; and an isolated polynucleotide encoding a full-length squalene epoxidase polypeptide.

[0119] In another embodiment, the recombinant expression vector of the invention comprises an isolated polynucleotide having a sequence selected from the group consisting of SEQ ID NO:417; SEQ ID NO:419; SEQ ID NO:421; SEQ ID NO:423; SEQ ID NO:425; SEQ ID NO:427; SEQ ID NO:429; SEQ ID NO:431; SEQ ID NO:435; SEQ ID NO:437; SEQ ID NO:439; SEQ ID NO:447; and SEQ ID NO:449. In addition, the recombinant expression vector of the invention comprises an isolated polynucleotide encoding a polypeptide having an amino acid sequence selected from the group consisting of SEQ ID NO:418; SEQ ID NO:420; SEQ ID NO:422; SEQ ID NO:424; SEQ ID NO:426; SEQ ID NO:428; SEQ ID NO:430; SEQ ID NO:432; SEQ ID NO:436; SEQ ID NO:438; SEQ ID NO:440; SEQ ID NO:448; and SEQ ID NO:450.

[0120] The invention further provides a seed produced by a transgenic plant expressing polynucleotide listed in Table 1, wherein the seed contains the polynucleotide, and wherein the plant is true breeding for increased growth and/or yield under normal or stress conditions and/or increased tolerance to an environmental stress as compared to a wild type variety of the plant. The invention also provides a product produced by or from the transgenic plants expressing the polynucleotide, their plant parts, or their seeds. The product can be obtained using various methods well known in the art. As used herein, the word “product” includes, but not limited to, a foodstuff, feedstuff, a food supplement, feed supplement, fiber, cosmetic or pharmaceutical. Foodstuffs are regarded as compositions used for nutrition or for supplementing nutrition. Animal feedstuffs and animal feed supplements, in particular, are regarded as foodstuffs. The invention further provides an agricultural product produced by any of the transgenic plants, plant parts, and plant seeds. Agricultural products include, but are not limited to, plant extracts, proteins, amino acids, carbohydrates, fats, oils, polymers, vitamins, and the like.

[0121] In a preferred embodiment, an isolated polynucleotide of the invention comprises a polynucleotide having a sequence selected from the group consisting of the polynucleotide sequences listed in Table 1. These polynucleotides may comprise sequences of the coding region, as well as 5′ untranslated sequences and 3′ untranslated sequences.

[0122] A polynucleotide of the invention can be isolated using standard molecular biology techniques and the sequence information provided herein, for example, using an automated DNA synthesizer.

[0123] “Homologs” are defined herein as two nucleic acids or polypeptides that have similar, or substantially identical, nucleotide or amino acid sequences, respectively. Homologs include allelic variants, analogs, and orthologs, as defined below. As used herein, the term “analogs” refers to two nucleic acids that have the same or similar function, but that have evolved separately in unrelated organisms. As used herein, the term “orthologs” refers to two nucleic acids from different species, but that have evolved from a common ancestral gene by speciation. The term homolog further encompasses nucleic acid molecules that differ from one of the nucleotide sequences shown in Table 1 due to degeneracy of the genetic code and thus encode the same polypeptide. As used herein, a “naturally occurring” nucleic acid molecule refers to an RNA or DNA molecule having a nucleotide sequence that occurs in nature (e.g., encodes a natural polypeptide).

[0124] To determine the percent sequence identity of two amino acid sequences (e.g., one of the polypeptide sequences of Table 1 and a homolog thereof), the sequences are aligned for optimal comparison purposes (e.g., gaps can be introduced in the sequence of one polypeptide for optimal alignment with the other polypeptide or nucleic acid). The amino acid residues at corresponding amino acid positions are then compared. When a position in one sequence is occupied by the same amino acid residue as the corresponding position in the other sequence then the molecules are identical at that position. The same type of comparison can be made between two nucleic acid sequences.

[0125] Preferably, the isolated amino acid homologs, analogs, and orthologs of the polypeptides of the present invention are at least about 50-60%, preferably at least about 60-70%, and more preferably at least about 70-75%, 75-80%, 80-85%, 85-90%, or 90-95%, and most preferably at least about 96%, 97%, 98%, 99%, or more identical to an entire amino acid sequence identified in Table 1. In another preferred embodiment, an isolated nucleic acid homolog of the invention comprises a nucleotide sequence which is at least about 40-60%, preferably at least about 60-70%, more preferably at least about 70-75%, 75-80%, 80-85%, 85-90%, or 90-95%, and even more preferably at least about 95%, 96%, 97%, 98%, 99%, or more identical to a nucleotide sequence shown in Table 1.

[0126] For the purposes of the invention, the percent sequence identity between two nucleic acid or polypeptide sequences is determined using Align 2.0 (Myers and Miller, CABIOS (1989) 4:11-17) with all parameters set to the default settings or the Vector NTI 9.0 (PC) software package (Invitrogen, 1600 Faraday Ave., Carlsbad, Calif. 92008). For percent identity calculated with Vector NTI, a gap opening penalty of 15 and a gap extension penalty of 6.66 are used for determining the percent identity of two nucleic acids. A gap opening penalty of 10 and a gap extension penalty of 0.1 are used for determining the percent identity of two polypeptides. All other parameters are set at the default settings. For purposes of a multiple alignment (Clustal W algorithm), the gap opening penalty is 10, and the gap extension penalty is 0.05 with blosum62 matrix. It is to be understood that for the purposes of determining sequence identity when comparing a DNA sequence to an RNA sequence, a thymidine nucleotide is equivalent to a uracil nucleotide.

[0127] Nucleic acid molecules corresponding to homologs, analogs, and orthologs of the polypeptides listed in Table 1 can be isolated based on their identity to said polypeptides, using the polynucleotides encoding the respective polypeptides or primers based thereon, as hybridization probes according to standard hybridization techniques under stringent hybridization conditions. As used herein with regard to hybridization for DNA to a DNA blot, the term “stringent conditions” refers to hybridization overnight at 60° C. in 10×Denhart's solution, 6×SSC, 0.5% SDS, and 100 g/ml denatured salmon sperm DNA. Blots are washed sequentially at 62° C. for 30 minutes each time in 3×SSC/0.1% SDS, followed by 1×SSC/0.1% SDS, and finally 0.1×SSC/0.1% SDS. As also used herein, in a preferred embodiment, the phrase “stringent conditions” refers to hybridization in a 6×SSC solution at 65° C. In another embodiment, “highly stringent conditions” refers to hybridization overnight at 65° C. in 10×Denhart's solution, 6×SSC, 0.5% SDS and 100 g/ml denatured salmon sperm DNA. Blots are washed sequentially at 65° C. for 30 minutes each time in 3×SSC/0.1% SDS, followed by 1×SSC/0.1% SDS, and finally 0.1×SSC/0.1% SDS. Methods for performing nucleic acid hybridizations are well known in the art. Preferably, an isolated nucleic acid molecule of the invention that hybridizes under stringent or highly stringent conditions to a nucleotide sequence listed in Table 1 corresponds to a naturally occurring nucleic acid molecule.

[0128] There are a variety of methods that can be used to produce libraries of potential homologs from a degenerate oligonucleotide sequence. Chemical synthesis of a degenerate gene sequence can be performed in an automatic DNA synthesizer, and the synthetic gene is then ligated into an appropriate expression vector. Use of a degenerate set of genes allows for the provision, in one mixture, of all of the sequences encoding the desired set of potential sequences. Methods for synthesizing degenerate oligonucleotides are known in the art.

[0129] The isolated polynucleotides employed in the invention may be optimized, that is, genetically engineered to increase its expression in a given plant or animal. To provide plant optimized nucleic acids, the DNA sequence of the gene can be modified to: 1) comprise codons preferred by highly expressed plant genes; 2) comprise an A+T content in nucleotide base composition to that substantially found in plants; 3) form a plant initiation sequence; 4) to eliminate sequences that cause destabilization, inappropriate polyadenylation, degradation and termination of RNA, or that form secondary structure hairpins or RNA splice sites; or 5) elimination of antisense open reading frames. Increased expression of nucleic acids in plants can be achieved by utilizing the distribution frequency of codon usage in plants in general or in a particular plant. Methods for optimizing nucleic acid expression in plants can be found in EPA 0359472; EPA 0385962; PCT Application No. WO 91/16432; U.S. Pat. No. 5,380,831; U.S. Pat. No. 5,436,391; Perlack et al., 1991, Proc. Natl. Acad. Sci. USA 88:3324-3328; and Murray et al., 1989, Nucleic Acids Res. 17:477-498.

[0130] The invention further provides a recombinant expression vector which comprise an expression cassette selected from the group consisting of a) an expression cassette comprising, in operative association, an isolated polynucleotide encoding a promoter capable of enhancing gene expression in leaves; and an isolated polynucleotide encoding a full-length polypeptide which is a subunit of acyl-CoA synthetase; b) an expression cassette comprising, in operative association, an isolated polynucleotide encoding a promoter capable of enhancing gene expression in leaves; and an isolated polynucleotide encoding a full-length beta-ketoacyl-ACP synthase polypeptide; c) an expression cassette comprising in operative association, an isolated polynucleotide encoding a promoter capable of enhancing gene expression in leaves; an isolated polynucleotide encoding a mitochondrial transit peptide; and an isolated polynucleotide encoding a subunit of an acetyl-CoA carboxylase complex, d) an expression cassette comprising, in operative association, an isolated polynucleotide encoding a promoter capable of enhancing gene expression in leaves; an isolated polynucleotide encoding a mitochondrial transit peptide; and an isolated polynucleotide encoding a full-length 3-oxoacyl-[ACP] synthase II polypeptide; e) an expression cassette comprising, in operative association, an isolated polynucleotide encoding a promoter; an isolated polynucleotide encoding a full-length 3-oxoacyl-[ACP] reductase polypeptide, and optionally a mitochondrial or chloroplast transit peptide; and f) an expression cassette comprising, in operative association, an isolated polynucleotide encoding a promoter, an isolated polynucleotide encoding a mitochondrial transit peptide, and an isolated polynucleotide encoding a full-length biotin synthetase polypeptide.

[0131] In another embodiment, the recombinant expression vector of the invention comprises an isolated polynucleotide having a sequence selected from the group consisting of SEQ ID NO:291; SEQ ID NO:293; SEQ ID NO:295; SEQ ID NO:297; SEQ ID NO:299; SEQ ID NO:301; SEQ ID NO:303; SEQ ID NO:311; SEQ ID NO:313; SEQ ID NO:315; SEQ ID NO:331; SEQ ID NO:333; SEQ ID NO:337; SEQ ID NO:339; SEQ ID NO:341; SEQ ID NO:347; SEQ ID NO:349; SEQ ID NO:351; SEQ ID NO:353; SEQ ID NO:355; SEQ ID NO:357; SEQ ID NO:359; SEQ ID NO:361; SEQ ID NO:363; SEQ ID NO:365; SEQ ID NO:367; SEQ ID NO:369; SEQ ID NO:371; SEQ ID NO:373; SEQ ID NO:375; SEQ ID NO:377; SEQ ID NO:379; SEQ ID NO:383; SEQ ID NO:385; SEQ ID NO:387; SEQ ID NO:389; SEQ ID NO:391; SEQ ID NO:393; SEQ ID NO:395; SEQ ID NO:399; and SEQ ID NO:401. In addition, the recombinant expression vector of the invention comprises an isolated polynucleotide encoding a polypeptide having an amino acid sequence selected from the group consisting of SEQ ID NO:292; SEQ ID NO:294; SEQ ID NO:296; SEQ ID NO:298; SEQ ID NO:300; SEQ ID NO:302; SEQ ID NO:304; SEQ ID NO:312; SEQ ID NO:314; SEQ ID NO:316; SEQ ID NO:332; SEQ ID NO:334; SEQ ID NO:338; SEQ ID NO:340; SEQ ID NO:342; SEQ ID NO:348; SEQ ID NO:350; SEQ ID NO:352; SEQ ID NO:354; SEQ ID NO:356; SEQ ID NO:358; SEQ ID NO:360; SEQ ID NO:362; SEQ ID NO:364; SEQ ID NO:366; SEQ ID NO:368; SEQ ID NO:370; SEQ ID NO:372; SEQ ID NO:374; SEQ ID NO:376; SEQ ID NO:378; SEQ ID NO:380; SEQ ID NO:384; SEQ ID NO:386; SEQ ID NO:388; SEQ ID NO:390; SEQ ID NO:392; SEQ ID NO:394; SEQ ID NO:396; SEQ ID NO:400; and SEQ ID NO:402.

[0132] Additionally, optimized nucleic acids can be created. Preferably, an optimized nucleic acid encodes a polypeptide that has a function similar to those of the polypeptides listed in Table 1 and/or modulates a plant's growth and/or yield under normal and/or water-limited conditions and/or tolerance to an environmental stress, and more preferably increases a plant's growth and/or yield under normal and/or water-limited conditions and/or tolerance to an environmental stress upon its overexpression in the plant. As used herein, “optimized” refers to a nucleic acid that is genetically engineered to increase its expression in a given plant or animal. To provide plant optimized nucleic acids, the DNA sequence of the gene can be modified to: 1) comprise codons preferred by highly expressed plant genes; 2) comprise an A+T content in nucleotide base composition to that substantially found in plants; 3) form a plant initiation sequence; 4) to eliminate sequences that cause destabilization, inappropriate polyadenylation, degradation and termination of RNA, or that form secondary structure hairpins or RNA splice sites; or 5) elimination of antisense open reading frames. Increased expression of nucleic acids in plants can be achieved by utilizing the distribution frequency of codon usage in plants in general or in a particular plant. Methods for optimizing nucleic acid expression in plants can be found in EPA 0359472; EPA 0385962; PCT Application No. WO 91/16432; U.S. Pat. No. 5,380,831; U.S. Pat. No. 5,436,391; Perlack et al., 1991, Proc. Natl. Acad. Sci. USA 88:3324-3328; and Murray et al., 1989, Nucleic Acids Res. 17:477-498.

[0133] An isolated polynucleotide of the invention can be optimized such that its distribution frequency of codon usage deviates, preferably, no more than 25% from that of highly expressed plant genes and, more preferably, no more than about 10%. In addition, consideration is given to the percentage G+C content of the degenerate third base (monocotyledons appear to favor G+C in this position, whereas dicotyledons do not). It is also recognized that the XCG (where X is A, T, C, or G) nucleotide is the least preferred codon in dicots, whereas the XTA codon is avoided in both monocots and dicots. Optimized nucleic acids of this invention also preferably have CG and TA doublet avoidance indices closely approximating those of the chosen host plant. More preferably, these indices deviate from that of the host by no more than about 10-15%.

[0134] The invention further provides an isolated recombinant expression vector comprising a polynucleotide as described above, wherein expression of the vector in a host cell results in the plant's increased growth and/or yield under normal or water-limited conditions and/or increased tolerance to environmental stress as compared to a wild type variety of the host cell. Accordingly, the isolated recombinant expression vector of the invention may be used to increase expression of nucleotides and polypeptides of Table 1 and thus to modulate floral organ development, root initiation, and yield in plants. When the nucleotides and polypeptides of Table 1 are expressed in a cereal plant of interest, the result is improved yield of the plant. In one embodiment, the invention provides a transgenic plant that overexpresses an isolated polynucleotide identified in Table 1 in the subcellular compartment and tissue indicated herein. The transgenic plant of the invention demonstrates an improved yield as compared to a wild type variety of the plant. As used herein, the term “improved yield” means any improvement in the yield of any measured plant product, such as grain, fruit or fiber. In accordance with the invention, changes in different phenotypic traits may improve yield. For example, and without limitation, parameters such as floral organ development, root initiation, root biomass, seed number, seed weight, harvest index, tolerance to abiotic environmental stress, leaf formation, phototropism, apical dominance, and fruit development, are suitable measurements of improved yield. Any increase in yield is an improved yield in accordance with the invention. For example, the improvement in yield can comprise a 0.1%, 0.5%, 1%, 3%, 5%, 10%, 15%, 20%, 30%, 40%, 50%, 60%, 70%, 80%, 90% or greater increase in any measured plant product. Alternatively, the increased plant yield can comprise about a 1.001 fold, 1.01 fold, 1.1 fold, 2 fold, 4 fold, 8 fold, 16 fold or 32 fold increase in measured plant products. For example, an increase in the bu/acre yield of soybeans or corn derived from a crop comprising plants which are transgenic for the nucleotides and polypeptides of Table 1, as compared with the bu/acre yield from untreated soybeans or corn cultivated under the same conditions, would be considered an improved yield. By increased yield it is also intended at least one of an increase in total seed numbers, an increase in total seed weight, an increase in root biomass and an increase in harvest index as compared to a wild-type variety of the crop plant that does not contain the recombinant expression vector of the invention.

[0135] The recombinant expression vectors of the invention comprise a nucleic acid of the invention in a form suitable for expression of the nucleic acid in a host cell, which means that the recombinant expression vectors include one or more regulatory sequences, selected on the basis of the host cells to be used for expression, which is operatively linked to the nucleic acid sequence to be expressed. As used herein with respect to a recombinant expression vector, “operatively linked” is intended to mean that the nucleotide sequence of interest is linked to the regulatory sequence(s) in a manner which allows for expression of the nucleotide sequence (e.g., in a bacterial or plant host cell when the vector is introduced into the host cell). The term “regulatory sequence” is intended to include promoters, enhancers, and other expression control elements (e.g., polyadenylation signals). Such regulatory sequences are well known in the art. Regulatory sequences include those that direct constitutive expression of a nucleotide sequence in many types of host cells and those that direct expression of the nucleotide sequence only in certain host cells or under certain conditions. It will be appreciated by those skilled in the art that the design of the expression vector can depend on such factors as the choice of the host cell to be transformed, the level of expression of polypeptide desired, etc. The expression vectors of the invention can be introduced into host cells to thereby produce polypeptides encoded by nucleic acids as described herein.

[0136] The recombinant expression vector of the invention also include one or more regulatory sequences, selected on the basis of the host cells to be used for expression, which is in operative association with the isolated polynucleotide to be expressed. As used herein with respect to a recombinant expression vector, “in operative association” or “operatively linked” means that the polynucleotide of interest is linked to the regulatory sequence(s) in a manner which allows for expression of the polynucleotide when the vector is introduced into the host cell (e.g., in a bacterial or plant host cell). The term “regulatory sequence” is intended to include promoters, enhancers, and other expression control elements (e.g., polyadenylation signals).

[0137] Plant gene expression should be operatively linked to an appropriate promoter conferring gene expression in a timely, cell specific, or tissue specific manner. Promoters useful in the expression cassettes of the invention include any promoter that is capable of initiating transcription in a plant cell. Such promoters include, but are not limited to, those that can be obtained from plants, plant viruses, and bacteria that contain genes that are expressed in plants, such as Agrobacterium and Rhizobium.

[0138] The promoter may be constitutive, inducible, developmental stage-preferred, cell type-preferred, tissue-preferred, or organ-preferred. Constitutive promoters are active under most conditions. Examples of constitutive promoters include the CaMV 19S and 35S promoters, the sX CaMV 35S promoter, the Sep1 promoter, the rice actin promoter, the Arabidopsis actin promoter, the ubiquitin promoter, pEmu, the figwort mosaic virus 35S promoter, the Smas promoter, the super promoter (U.S. Pat. No. 5,955,646), the GRP1-8 promoter, the cinnamyl alcohol dehydrogenase promoter (U.S. Pat. No. 5,683,439), promoters from the T-DNA of Agrobacterium, such as mannopine synthase, nopaline synthase, and octopine synthase, the small subunit of ribulose biphosphate carboxylase (ssuRUBISCO) promoter, and the like.

[0139] Inducible promoters are preferentially active under certain environmental conditions, such as the presence or absence of a nutrient or metabolite, heat or cold, light, pathogen attack, anaerobic conditions, and the like. For example, the hsp80 promoter from Brassica is induced by heat shock; the PPDK promoter is induced by light; the PR-1 promoters from tobacco, Arabidopsis, and maize are inducible by infection with a pathogen; and the Adh1 promoter is induced by hypoxia and cold stress. Plant gene expression can also be facilitated via an inducible promoter (For a review, see Gatz, 1997, Annu. Rev. Plant Physiol. Plant Mol. Biol. 48:89-108). Chemically inducible promoters are especially suitable if gene expression is wanted to occur in a time specific manner. Examples of such promoters are a salicylic acid inducible promoter (PCT Application No. WO 95/19443), a tetracycline inducible promoter (Gatz et al., 1992, Plant J. 2: 397-404), and an ethanol inducible promoter (PCT Application No. WO 93/21334).

[0140] In one preferred embodiment of the present invention, the inducible promoter is a stress-inducible promoter. For the purposes of the invention, stress-inducible promoters are preferentially active under one or more of the following stresses: sub-optimal conditions associated with salinity, drought, nitrogen, temperature, metal, chemical, pathogenic, and oxidative stresses. Stress inducible promoters include, but are not limited to, Cor78 (Chak et al., 2000, Planta 210:875-883; Hovath et al., 1993, Plant Physiol. 103:1047-1053), Cori5a (Artus et al., 1996, PNAS 93(23):13404-09), Rci2A (Medina et al., 2001, Plant Physiol. 125:1655-66; Nylander et al., 2001, Plant Mol. Biol. 45:341-52; Navarre and Goffeau, 2000, EMBO J. 19:2515-24; Capel et al., 1997, Plant Physiol. 115:569-76), Rd22 (Xiong et al., 2001, Plant Cell 13:2063-83; Abe et al., 1997, Plant Cell 9:1859-68; Iwasaki et al., 1995, Mol. Gen. Genet. 247:391-8), cDet6 (Lang and Palve, 1992, Plant Mol. Biol. 20:951-62), ADH1 (Hoeren et al., 1998, Genetics 149:479-90), KAT1 (Nakamura et al., 1995, Plant Physiol. 109:371-4), KST1 (Müller-Röber et al., 1995, EMBO 14:2409-16), Rha1 (Terryn et al., 1993, Plant Cell 5:1761-9; Terryn et al., 1992, FEBS Lett. 299(3):287-90), ARSK1 (Atkinson et al., 1997, GenBank Accession # L22302, and PCT Application No. WO 97/20057), PtxA (Plesch et al., GenBank Accession # X67427), SbHRGP3 (Ahn et al., 1996, Plant Cell 8:1477-90), GH3 (Liu et al., 1994, Plant Cell 6:645-57), the pathogen inducible PRP1-gene promoter (Ward et al., 1993, Plant. Mol. Biol. 22:361-366), the heat inducible hsp80-promoter from tomato (U.S. Pat. No. 5,187,267), cold inducible alpha-amylase promoter from potato (PCT Application No. WO 96/12814), or the wound-inducible pinII-promoter (European Patent No. 375091). For other examples of drought, cold, and salt-inducible promoters, such as the RD29A promoter, see Yamaguchi-Shinozalei et al., 1993, Mol. Gen. Genet. 236:331-340.

[0141] Developmental stage-preferred promoters are preferentially expressed at certain stages of development. Tissue and organ preferred promoters include those that are preferentially expressed in certain tissues or organs, such as leaves, roots, seeds, or xylem. Examples of tissue-preferred and organ-preferred promoters include, but are not limited to fruit-preferred, ovule-preferred, male tissue-preferred, seed-preferred, integument-preferred, tuber-preferred, stalk-preferred, pericarp-preferred, leaf-preferred, stigma-preferred, pollen-preferred, anther-preferred, petal-preferred, sepal-preferred, pedicel-preferred, silique-preferred, stem-preferred, root-preferred promoters, and the like. Seed-preferred promoters are preferentially expressed during seed development and/or germination. For example, seed-preferred promoters can be embryo-preferred, endosperm-preferred, and seed coat-preferred (See Thompson et al., 1989, BioEssays 10:108). Examples of seed-preferred promoters include, but are not limited to, cellulose synthase (celA), Cim1, gamma-zein, globulin-1, maize 19 kD zein (cZ19B1), and the like.

[0142] Other suitable tissue-preferred or organ-preferred promoters include the napin-gene promoter from rapeseed (U.S. Pat. No. 5,608,152), the USP-promoter from Vicia faba (Baeumlein et al., 1991, Mol. Gen. Genet. 225(3): 459-67), the oleosin-promoter from Arabidopsis (PCT Application No. WO 98/45461), the phaseolin-promoter from Phaseolus vulgaris (U.S. Pat. No. 5,504,200), the Bce4-promoter from Brassica (PCT Application No. WO 91/13980), or the legumin B4 promoter (LeB4; Baeumlein et al., 1992, Plant Journal, 2(2): 233-9), as well as promoters conferring seed specific expression in monocot plants like maize, barley, wheat, rye, rice, etc. Suitable promoters to note are the Ipt2 or Ipt1-gene promoter from barley (PCT Application No. WO 95/15389 and PCT Application No. WO 95/23230) or those described in PCT Application No. WO 99/16890 (promoters from the barley hordein-gene, rice glutelin gene, rice oryzin gene, rice prolamin gene, wheat gliadin gene, wheat glutelin gene, oat glutelin gene, Sorghum kasirin-gene, and rye secalin gene).

[0143] Other promoters useful in the expression cassettes of the invention include, but are not limited to, the major chlorophyll a/b binding protein promoter, histone promoters, the Ap3 promoter, the β-conglycin promoter, the napin promoter, the soybean lectin promoter, the maize 15 kD zein promoter, the 22 kD zein promoter, the 27 kD zein promoter, the —zein promoter, the waxy, shrunken 1, shrunken 2, and bronze promoters, the Zm13 promoter (U.S. Pat. No. 5,086,169), the maize polygalacturonase promoters (PG) (U.S. Pat. Nos. 5,412,085 and 5,545,546), and the SGB6 promoter (U.S. Pat. No. 5,470,359), as well as synthetic or other natural promoters.

[0144] As set forth above, certain embodiments of the invention employ promoters that are capable of enhancing gene expression in leaves. In some embodiments, the promoter is a leaf-specific promoter. Any leaf-specific promoter may be employed in these embodiments of the invention. Many such promoters are known, for example, the USP promoter from Vicia faba (SEQ ID NO:403 or SEQ ID NO:404, Baeumlein et al. (1991) Mol. Gen. Genet. 225, 459-67), promoters of light-inducible genes such as ribulose-1.5-bisphosphate carboxylase (rbcS promoters), promoters of genes encoding chlorophyll a/b-binding proteins (Cab), Rubisco activase, B-subunit of chloroplast glyceraldehyde 3-phosphate dehydrogenase from A. thaliana, (Kwon et al. (1994) Plant Physiol. 105, 357-67) and other leaf specific promoters such as those identified in Aleman, I. (2001) Isolation and characterization of leaf-specific promoters from alfalfa (Medicago sativa), Masters thesis, New Mexico State University, Los Cruces, N. Mex., and the like.

[0145] In other embodiments of the invention, a root or shoot specific promoter is employed. For example, the Super promoter (SEQ ID NO:405) provides high level expression in both root and shoots (Ni et al. (1995) Plant J. 7: 661-676). Other root specific promoters include, without limitation, the TobRB7 promoter (Yamamoto et al. (1991) Plant Cell 3, 371-382), the rolD promoter (Leach et al. (1991) Plant Science 79, 69-76); CaMV 35S Domain A (Benfey et al. (1989) Science 244, 174-181), and the like.

[0146] In other embodiments, a constitutive promoter is employed. Constitutive promoters are active under most conditions. Examples of constitutive promoters suitable for use in these embodiments include the parsley ubiquitin promoter described in WO 2003/102198 (SEQ ID NO:406, (SEQ ID NO:452)); the CaMV 19S and 35S promoters, the sX CaMV 35S promoter, the Sep1 promoter, the rice actin promoter, the Arabidopsis actin promoter, the maize ubiquitin promoter, pEmu, the figwort mosaic virus 35S promoter, the Smas promoter, the super promoter (U.S. Pat. No. 5,955,646), the GRP1-8 promoter, the cinnamyl alcohol dehydrogenase promoter (U.S. Pat. No. 5,683,439), promoters from the T-DNA of Agrobacterium, such as mannopine synthase, nopaline synthase, and octopine synthase, the small subunit of ribulose biphosphate carboxylase (ssuRUBISCO) promoter, and the like.

[0147] In accordance with the invention, a chloroplast transit sequence refers to a nucleotide sequence that encodes a chloroplast transit peptide. Chloroplast targeting sequences are known in the art and include the chloroplast small subunit of ribulose-1,5-bisphosphate carboxylase (Rubisco) (de Castro Silva Filho et al. (1996) Plant Mol. Biol. 30:769-780; Schnell et al. (1991) J. Biol. Chem. 266(5):3335-3342); 5-(enolpyruvyl)shikimate-3-phosphate synthase (EPSPS) (Archer et al. (1990) J. Bioenerg. Biomemb. 22(6):789-810); tryptophan synthase (Zhao et al. (1995) J. Biol. Chem. 270(11):6081-6087); plastocyanin (Lawrence et al. (1997) J. Biol. Chem. 272(33):20357-20363); chorismate synthase (Schmidt et al. (1993) J. Biol. Chem. 268(36):27447-27457); ferredoxin (Jansen et al. (1988) Curr. Genetics 13:517-522) (SEQ ID NO:460); nitrite reductase (Back et al (1988) MGG 212:20-26) and the light harvesting chlorophyll a/b binding protein (LHBP) (Lamppa et al. (1988) J. Biol. Chem. 263:14996-14999). See also Von Heijne et al. (1991) Plant Mol. Biol. Rep. 9:104-126; Clark et al. (1989) J. Biol. Chem. 264:17544-17550; Della-Cioppa et al. (1987) Plant Physiol. 84:965-968; Romer et al. (1993) Biochem. Biophys. Res. Commun. 196:1414-1421; and Shah et al. (1986) Science 233:478-481. As defined herein, a mitochondrial transit sequence refers to a nucleotide sequence that encodes a mitochondrial presequence and directs the protein to mitochondria. Examples of mitochondrial presequences include groups consisting of ATPase subunits, ATP synthase subunits, Rieske-FeS protein, Hsp60, malate dehydrogenase, citrate synthase, aconitase, isocitrate dehydrogenase, pyruvate dehydrogenase, malic enzyme, glycine decarboxylase, serine hydroxymethyl transferase, isovaleryl-CoA dehydrogenase and superoxide dismutase. Such transit peptides are known in the art. See, for example, Von Heijne et al. (1991) Plant Mol. Biol. Rep. 9:104-126; Clark et al. (1989) J. Biol. Chem. 264:17544-17550; Della-Cioppa et al. (1987) Plant Physiol. 84:965-968; Romer et al. (1993) Biochem. Biophys. Res. Commun. 196:1414-1421; Faivre-Nitschke et al (2001) Eur J Biochem 268 1332-1339; Däschner et al. (1999) 39:1275-1282 (SEQ ID NO:456 and SEQ ID NO:458) and Shah et al. (1986) Science 233:478-481.

[0148] Additional flexibility in controlling heterologous gene expression in plants may be obtained by using DNA binding domains and response elements from heterologous sources (i.e., DNA binding domains from non-plant sources). An example of such a heterologous DNA binding domain is the LexA DNA binding domain (Brent and Ptashne, 1985, Cell 43:729-736).

[0149] In a preferred embodiment of the present invention, the polynucleotides listed in Table 1 are expressed in plant cells from higher plants (e.g., the spermatophytes, such as crop plants). A polynucleotide may be “introduced” into a plant cell by any means, including transfection, transformation or transduction, electroporation, particle bombardment, agroinfection, and the like. Suitable methods for transforming or transfecting plant cells are disclosed, for example, using particle bombardment as set forth in U.S. Pat. Nos. 4,945,050; 5,036,006; 5,100,792; 5,302,523; 5,464,765; 5,120,657; 6,084,154; and the like. More preferably, the transgenic corn seed of the invention may be made using Agrobacterium transformation, as described in U.S. Pat. Nos. 5,591,616; 5,731,179; 5,981,840; 5,990,387; 6,162,965; 6,420,630, U.S. patent application publication number 2002/0104132, and the like. Transformation of soybean can be performed using for example a technique described in European Patent No. EP 0424047, U.S. Pat. No. 5,322,783, European Patent No. EP 0397 687, U.S. Pat. No. 5,376,543, or U.S. Pat. No. 5,169,770. A specific example of wheat transformation can be found in PCT Application No. WO 93/07256. Cotton may be transformed using methods disclosed in U.S. Pat. Nos. 5,004,863; 5,159,135; 5,846,797, and the like. Rice may be transformed using methods disclosed in U.S. Pat. Nos. 4,666,844; 5,350,688; 6,153,813; 6,333,449; 6,288,312; 6,365,807; 6,329,571, and the like. Canola may be transformed, for example, using methods such as those disclosed in U.S. Pat. Nos. 5,188,958; 5,463,174; 5,750,871; EP1566443; WO02/00900; and the like. Other plant transformation methods are disclosed, for example, in U.S. Pat. Nos. 5,932,782; 6,153,811; 6,140,553; 5,969,213; 6,020,539, and the like. Any plant transformation method suitable for inserting a transgene into a particular plant may be used in accordance with the invention.

[0150] According to the present invention, the introduced polynucleotide may be maintained in the plant cell stably if it is incorporated into a non-chromosomal autonomous replicon or integrated into the plant chromosomes. Alternatively, the introduced polynucleotide may be present on an extra-chromosomal non-replicating vector and may be transiently expressed or transiently active.

[0151] Another aspect of the invention pertains to an isolated polypeptide having a sequence selected from the group consisting of the polypeptide sequences listed in Table 1. An “isolated” or “purified” polypeptide is free of some of the cellular material when produced by recombinant DNA techniques, or chemical precursors or other chemicals when chemically synthesized. The language “substantially free of cellular material” includes preparations of a polypeptide in which the polypeptide is separated from some of the cellular components of the cells in which it is naturally or recombinantly produced. In one embodiment, the language “substantially free of cellular material” includes preparations of a polypeptide of the invention having less than about 30% (by dry weight) of contaminating polypeptides, more preferably less than about 20% of contaminating polypeptides, still more preferably less than about 10% of contaminating polypeptides, and most preferably less than about 5% contaminating polypeptides.

[0152] The determination of activities and kinetic parameters of enzymes is well established in the art. Experiments to determine the activity of any given altered enzyme must be tailored to the specific activity of the wild-type enzyme, which is well within the ability of one skilled in the art. Overviews about enzymes in general, as well as specific details concerning structure, kinetics, principles, methods, applications and examples for the determination of many enzyme activities are abundant and well known to one skilled in the art.

[0153] The invention is also embodied in a method of producing a transgenic plant comprising at least one polynucleotide listed in Table 1, wherein expression of the polynucleotide in the plant results in the plant's increased growth and/or yield under normal or water-limited conditions and/or increased tolerance to an environmental stress as compared to a wild type variety of the plant comprising the steps of: (a) introducing into a plant cell an expression vector comprising at least one polynucleotide listed in Table 1, and (b) generating from the plant cell a transgenic plant that expresses the polynucleotide, wherein expression of the polynucleotide in the transgenic plant results in the plant's increased growth and/or yield under normal or water-limited conditions and/or increased tolerance to environmental stress as compared to a wild type variety of the plant. The plant cell may be, but is not limited to, a protoplast, gamete producing cell, and a cell that regenerates into a whole plant. As used herein, the term “transgenic” refers to any plant, plant cell, callus, plant tissue, or plant part, that contains at least one recombinant polynucleotide listed in Table 1. In many cases, the recombinant polynucleotide is stably integrated into a chromosome or stable extra-chromosomal element, so that it is passed on to successive generations.

[0154] The present invention also provides a method of increasing a plant's growth and/or yield under normal or water-limited conditions and/or increasing a plant's tolerance to an environmental stress comprising the steps of increasing the expression of at least one polynucleotide listed in Table 1 in the plant. Expression of a protein can be increased by any method known to those of skill in the art.

[0155] The effect of the genetic modification on plant growth and/or yield and/or stress tolerance can be assessed by growing the modified plant under normal and/or less than suitable conditions and then analyzing the growth characteristics and/or metabolism of the plant. Such analysis techniques are well known to one skilled in the art, and include dry weight, wet weight, polypeptide synthesis, carbohydrate synthesis, lipid synthesis, evapotranspiration rates, general plant and/or crop yield, flowering, reproduction, seed setting, seed weight, seed number, root growth, respiration rates, photosynthesis rates, metabolite composition, etc., using methods known to those of skill in biotechnology.

[0156] In one embodiment the invention relates to subject mater summarized as follows:

[0157] Item 1 A transgenic plant transformed with an expression cassette comprising a polynucleotide encoding a full-length polypeptide having mitogen activated protein kinase activity, wherein the polypeptide comprises a domain having a sequence selected from the group consisting of amino acids 32 to 319 of SEQ ID NO:2; amino acids 42 to 329 of SEQ ID NO:4; amino acids 32 to 319 of SEQ ID NO:6; amino acids 32 to 310 of SEQ ID NO:8; amino acids 32 to 319 of SEQ ID NO:10; amino acids 32 to 319 of SEQ ID NO:12; amino acids 28 to 318 of SEQ ID NO:14; amino acids 32 to 326 of SEQ ID NO:16; amino acids 38 to 325 of SEQ ID NO:18; amino acids 44 to 331 of SEQ ID NO:20; amino acids 40 to 357 of SEQ ID NO:22; amino acids 60 to 346 of SEQ ID NO:24; amino acids 74 to 360 of SEQ ID NO:26; and amino acids 47 to 334 of SEQ ID NO:28 amino acids 47 to 334 of SEQ ID NO:28; amino acids 38 to 325 of SEQ ID NO:30; amino acids 32 to 319 of SEQ ID NO:32; amino acids 41 to 327 of SEQ ID NO:34; amino acids 43 to 329 of SEQ ID NO:36; and amino acids 58 to 344 of SEQ ID NO:38.

[0158] Item 2 The transgenic plant of item 1, wherein the polypeptide comprises amino acids 1 to 368 of SEQ ID NO:2; amino acids 1 to 376 of SEQ ID NO:4; amino acids 1 to 368 of SEQ ID NO:6; amino acids 1 to 369 of SEQ ID NO:8; amino acids 1 to 371 of SEQ ID NO:10; amino acids 1 to 375 of SEQ ID NO:12; amino acids 1 to 523 of SEQ ID NO:14; amino acids 1 to 494 of SEQ ID NO:16; amino acids 1 to 373 of SEQ ID NO:18; amino acids 1 to 377 of SEQ ID NO:20; amino acids 1 to 404 of SEQ ID NO:22; amino acids 1 to 394 of SEQ ID NO:24; amino acids 1 to 415 of SEQ ID NO:26; amino acids 1 to 381 of SEQ ID NO:28 amino acids 1 to 381 of SEQ ID NO:28; amino acids 1 to 376 of SEQ ID NO:30; amino acids 1 to 368 of SEQ ID NO:32; amino acids 1 to 372 of SEQ ID NO:34; amino acids 1 to 374 of SEQ ID NO:36; or amino acids 1 to 372 of SEQ ID NO:38.

[0159] Item 3 A transgenic plant transformed with an expression cassette comprising an isolated polynucleotide encoding a full-length polypeptide having calcium dependent protein kinase activity, wherein the polypeptide comprises:
[0160] a) a protein kinase domain selected from the group consisting of a domain having a sequence comprising amino acids 59 to 317 of SEQ ID NO:40; amino acids 111 to 369 of SEQ ID NO:42; amino acids 126 to 386 of SEQ ID NO:44; amino acids 79 to 337 of SEQ ID NO:46; amino acids 80 to 338 of SEQ ID NO:48; amino acids 125 to 287 of SEQ ID NO:50; amino acids 129 to 391 of SEQ ID NO:52; amino acids 111 to 371 of SEQ ID NO:54; amino acids 61 to 319 of SEQ ID NO:56; amino acids 86 to 344 of SEQ ID NO:58; amino acids 79 to 337 of SEQ ID NO:60; amino acids 78 to 336 of SEQ ID NO:62; amino acids 90 to 348 of SEQ ID NO:64; amino acids 56 to 314 of SEQ ID NO:66; amino acids 67 to 325 of SEQ ID NO:68; amino acids 81 to 339 of SEQ ID NO:70; and amino acids 83 to 341 of SEQ ID NO:72; and
[0161] b) at least one EF hand domain having a sequence selected from the group consisting of amino acids 364 to 392 of SEQ ID NO:40; amino acids 416 to 444 of SEQ ID NO:42; amino acids 433 to 461 of SEQ ID NO:44; amino acids 384 to 412 of SEQ ID NO:46; amino acids 385 to 413 of SEQ ID NO:48; amino acids 433 to 461 of SEQ ID NO:50; amino acids 436 to 463 of SEQ ID NO:52; amino acids 418 to 446 of SEQ ID NO:54; amino acids 366 to 394 of SEQ ID NO:56; amino acids 391 to 419 of SEQ ID NO:58; amino acids 384 to 412 of SEQ ID NO:60; amino acids 418 to 446 of SEQ ID NO:62; amino acids 395 to 423 of SEQ ID NO:64; amino acids 372 to 400 of SEQ ID NO:68; amino acids 388 to 416 of SEQ ID NO:72; amino acids 452 to 480 of SEQ ID NO:42; amino acids 470 to 498 of SEQ ID NO:44; amino acids 420 to 448 of SEQ ID NO:46; amino acids 421 to 449 of SEQ ID NO:48; amino acids 470 to 498 of SEQ ID NO:50; amino acids 472 to 500 of SEQ ID NO:52; amino acids 455 to 483 of SEQ ID NO:54; amino acids 402 to 430 of SEQ ID NO:56; amino acids 427 to 455 of SEQ ID NO:58; amino acids 420 to 448 of SEQ ID NO:60; amino acids 454 to 482 of SEQ ID NO:62; amino acids 444 to 472 of SEQ ID NO:68; amino acids 460 to 488 of SEQ ID NO:72; amino acids 488 to 516 of SEQ ID NO:42; amino acids 512 to 540 of SEQ ID NO:44; amino acids 456 to 484 of SEQ ID NO:46; amino acids 457 to 485 of SEQ ID NO:48; amino acids 510 to 535 of SEQ ID NO:50; amino acids 512 to 537 of SEQ ID NO:52; amino acids 497 to 525 of SEQ ID NO:54; amino acids 438 to 466 of SEQ ID NO:56; amino acids 463 to 491 of SEQ ID NO:58; amino acids 456 to 484 of SEQ ID NO:60; amino acids 522 to 550 of SEQ ID NO:42; amino acids 546 to 570 of SEQ ID NO:44; amino acids 491 to 519 of SEQ ID NO:46; amino acids 492 to 520 of SEQ ID NO:48; amino acids 542 to 570 of SEQ ID NO:50; amino acids 542 to 570 of SEQ ID NO:52; amino acids 531 to 555 of SEQ ID NO:54; amino acids 474 to 502 of SEQ ID NO:56; amino acids 497 to 525 of SEQ ID NO:58; and amino acid 490 to 518 of SEQ ID NO:60; amino acids 489 to 517 of SEQ ID NO:62; amino acids 501 to 529 of SEQ ID NO:64; amino acids 470 to 498 of SEQ ID NO:66; amino acids 479 to 507 of SEQ ID NO:68; amino acids 492 to 520 of SEQ ID NO:70; and amino acids 495 to 523 of SEQ ID NO:72.

[0162] Item 4 The transgenic plant of item 3, wherein the polypeptide has a sequence comprising amino acids 1 to 418 of SEQ ID NO:40; amino acids 1 to 575 of SEQ ID NO:42; amino acids 1 to 590 of SEQ ID NO:44; amino acids 1 to 532 of SEQ ID NO:46; amino acids 1 to 528 of SEQ ID NO:48; amino acids 1 to 578 of SEQ ID NO:50; amino acids 1 to 580 of SEQ ID NO:52; amino acids 1 to 574 of SEQ ID NO:54; amino acids 1 to 543 of SEQ ID NO:56; amino acids 1 to 549 of SEQ ID NO:58; amino acids 1 to 544 of SEQ ID NO:60; amino acids 1 to 534 of SEQ ID NO:62; amino acids 1 to 549 of SEQ ID NO:64; amino acids 1 to 532 of SEQ ID NO:66; amino acids 1 to 525 of SEQ ID NO:68; amino acids 1 to 548 of SEQ ID NO:70; or amino acids 1 to 531 of SEQ ID NO:72.

[0163] Item 5 A transgenic plant transformed with an expression cassette comprising an isolated polynucleotide a full-length polypeptide having cyclin dependent protein kinase activity, wherein the polypeptide comprises:
[0164] a) a cyclin N terminal domain having a sequence selected from the group consisting of amino acids 59 to 190 of SEQ ID NO:74; amino acids 63 to 197 of SEQ ID NO:76; amino acids 73 to 222 of SEQ ID NO:78; and amino acids 54 to 186 of SEQ ID NO:80 and
[0165] b) a cyclin C terminal domain having a sequence selected from the group consisting of amino acids 192 to 252 of SEQ ID NO:74; amino acids 199 to 259 of SEQ ID NO:76; amino acids 224 to 284 of SEQ ID NO:78; and amino acids 188 to 248 of SEQ ID NO:80.

[0166] Item 6 The transgenic plant of item 5, wherein the polypeptide has a sequence comprising amino acids 1 to 355 of SEQ ID NO:74; amino acids 1 to 360 of SEQ ID NO:76; amino acids 1 to 399 of SEQ ID NO:78; or amino acids 1 to 345 of SEQ ID NO:80.

[0167] Item 7 A transgenic plant transformed with an expression cassette comprising an isolated polynucleotide a full-length polypeptide having serine/threonine-specific protein kinase activity, wherein the polypeptide comprises a domain selected from the group consisting of a domain having a sequence comprising amino acids 15 to 271 of SEQ ID NO:82; amino acids 4 to 260 of SEQ ID NO:84; amino acids 4 to 260 of SEQ ID NO:86; amino acids 18 to 274 of SEQ ID NO:88; amino acids 23 to 279 of SEQ ID NO:90; amino acids 5 to 261 of SEQ ID NO:92; amino acids 23 to 279 of SEQ ID NO:94; amino acids 4 to 260 of SEQ ID NO:96; amino acids 12 to 268 of SEQ ID NO:98; and amino acids 4 to 260 of SEQ ID NO:100.

[0168] Item 8 The transgenic plant of item 7, wherein the polypeptide has a sequence comprising amino acids 1 to 348 of SEQ ID NO:82; amino acids 1 to 364 of SEQ ID NO:84; amino acids 1 to 354 of SEQ ID NO:86; amino acids 1 to 359 of SEQ ID NO:88; amino acids 1 to 360 of SEQ ID NO:90; amino acids 1 to 336 of SEQ ID NO:92; amino acids 1 to 362 of SEQ ID NO:94; amino acids 1 to 370 of SEQ ID NO:96; amino acids 1 to 350 of SEQ ID NO:98; or amino acids 1 to 361 of SEQ ID NO:100.

[0169] Item 9 An isolated polynucleotide having a sequence selected from the group consisting of the polynucleotide sequences set forth in Table 1.

[0170] Item 10 An isolated polypeptide having a sequence selected from the group consisting of the polypeptide sequences set forth in Table 1.

[0171] Item 11 A method of producing a transgenic plant comprising at least one polynucleotide listed in Table 1, wherein expression of the polynucleotide in the plant results in the plant's increased growth and/or yield under normal or water-limited conditions and/or increased tolerance to an environmental stress as compared to a wild type variety of the plant comprising the steps of:

(a) introducing into a plant cell an expression vector comprising at least one polynucleotide listed in Table 1, and
(b) generating from the plant cell a transgenic plant that expresses the polynucleotide, wherein expression of the polynucleotide in the transgenic plant results in the plant having increased growth or yield under normal or water-limited conditions or increased tolerance to environmental stress, as compared to a wild type variety of the plant.

[0172] Item 12 A method of increasing a plant's growth or yield under normal or water-limited conditions or increasing a plant's tolerance to an environmental stress comprising the steps of;

(a) introducing into a plant cell an expression vector comprising at least one polynucleotide listed in Table 1, and
(b) generating from the plant cell a transgenic plant that expresses the polynucleotide, wherein expression of the polynucleotide in the transgenic plant results in the plant having increased growth or yield under normal or water-limited conditions or increased tolerance to environmental stress, as compared to a wild type variety of the plant.

[0173] Item 13 A transgenic plant transformed with an expression cassette comprising an isolated polynucleotide encoding a full-length polypeptide having phospholipid hydroperoxide glutathione peroxidase activity, wherein the polypeptide comprises a glutathione peroxidase domain selected from the group consisting of 9 to 117 of SEQ ID NO:102; amino acids 17 to 125 of SEQ ID NO:104; amino acids 79 to 187 of SEQ ID NO:106; amino acids 10 to 118 of SEQ ID NO:108; amino acids 12 to 120 of SEQ ID NO:110; amino acids 9 to 117 of SEQ ID NO:112; amino acids 9 to 117 of SEQ ID NO:114; amino acids 10 to 118 of SEQ ID NO:116; amino acids 9 to 117 of SEQ ID NO:118; amino acids 77 to 185 of SEQ ID NO:120; amino acids 12 to 120 of SEQ ID NO:122; amino acids 12 to 120 of SEQ ID NO:124; amino acids 12 to 120 of SEQ ID NO:126; amino acids 12 to 120 of SEQ ID NO:128; amino acids 10 to 118 of SEQ ID NO:130; amino acids 70 to 178 of SEQ ID NO:132; amino acids 10 to 118 of SEQ ID NO:134; and amino acids 24 to 132 of SEQ ID NO:136.

[0174] Item 14 An isolated polynucleotide having a sequence selected from the group consisting of the polynucleotide sequences set forth in Table 1.

[0175] Item 15 An isolated polypeptide having a sequence selected from the group consisting of the polypeptide sequences set forth in Table 1.

[0176] Item 16 A method of producing a transgenic plant comprising at least one polynucleotide listed in Table 1, wherein expression of the polynucleotide in the plant results in the plant's increased growth or yield under normal or water-limited conditions or increased tolerance to an environmental stress as compared to a wild type variety of the plant comprising the steps of:

(a) introducing into a plant cell an expression vector comprising at least one polynucleotide listed in Table 1, and
(b) generating from the plant cell a transgenic plant that expresses the polynucleotide, wherein expression of the polynucleotide in the transgenic plant results in the plant's increased growth or yield under normal or water-limited conditions or increased tolerance to environmental stress as compared to a wild type variety of the plant.

[0177] Item 17 A method of increasing a plant's growth or yield under normal or water-limited conditions or increasing a plant's tolerance to an environmental stress comprising the steps of:
[0178] (a) introducing into a plant cell an expression vector comprising at least one polynucleotide listed in Table 1, and
[0179] (b) generating from the plant cell a transgenic plant that expresses the polynucleotide, wherein expression of the polynucleotide in the transgenic plant results in the plant's increased growth or yield under normal or water-limited conditions or increased tolerance to environmental stress, as compared to a wild type variety of the plant.

[0180] Item 18 A transgenic plant transformed with an expression cassette comprising an isolated polynucleotide encoding a full-length polypeptide comprising a TCP family transcription factor domain having a sequence selected from the group consisting of amino acids 57 to 249 of SEQ ID NO:138; amino acids 54 to 237 of SEQ ID NO:140; amino acids 43 to 323 of SEQ ID NO:142; or amino acids 41 to 262 of SEQ ID NO:144.

[0181] Item 19 A transgenic plant transformed with an expression cassette comprising an isolated polynucleotide encoding a full-length ribosomal protein S6 kinase polypeptide comprising:
[0182] a) a kinase domain having a sequence selected from the group consisting of amino acids 124 to 379 of SEQ ID NO:146; amino acids 150 to 406 of SEQ ID NO:148; and amino acids 152 to 408 of SEQ ID NO:150 or
[0183] b) a kinase C-terminal domain having a sequence selected from the group consisting of amino acids 399 to 444 of SEQ ID NO:146; amino acids 426 to 468 of SEQ ID NO:148; and amino acids 428 to 471 of SEQ ID NO:150.

[0184] Item 20 A transgenic plant transformed with an expression cassette comprising an isolated polynucleotide encoding a full-length polypeptide comprising a CAAX amino terminal protease domain having a sequence selected from the group consisting of amino acids 255 to 345 of SEQ ID NO:158; amino acids 229 to 319 of SEQ ID NO:160; and amino acids 267 to 357 of SEQ ID NO:162.

[0185] Item 21 A transgenic plant transformed with an expression cassette comprising an isolated polynucleotide encoding a full-length DNA binding protein comprising a metallopeptidase family M24 domain having a sequence selected from the group consisting of amino acids 21 to 296 of SEQ ID NO:164; amino acids 20 to 295 of SEQ ID NO:166; amino acids 20 to 295 of SEQ ID NO:168; amino acids 22 to 297 of SEQ ID NO:170; and amino acids 22 to 297 of SEQ ID NO:172.

[0186] Item 22 A transgenic plant transformed with an expression cassette comprising an isolated polynucleotide encoding a rev interacting protein mis3 having a sequence comprising amino acids 1 to 390 of SEQ ID NO:176; amino acids 1 to 389 of SEQ ID NO:178; or amino acids 1 to 391 of SEQ ID NO:180.

[0187] Item 23 A transgenic plant transformed with an expression cassette comprising an isolated polynucleotide encoding a GRF1 interacting factor comprising an SSXT protein (N terminal region) domain having a sequence selected from the group consisting of amino acids 7 to 80 of SEQ ID NO:182; amino acids 7 to 80 of SEQ ID NO:184; amino acids 7 to 80 of SEQ ID NO:186; and amino acids 6 to 79 of SEQ ID NO:188.

[0188] Item 24 A transgenic plant transformed with an expression cassette comprising an isolated polynucleotide encoding eukaryotic translation initiation factor 4A comprising:
[0189] a) a DEAD/DEAH box helicase domain having a sequence selected from the group consisting of amino acids 59 to 225 of SEQ ID NO:190; amino acids 64 to 230 of SEQ ID NO:192; amino acids 58 to 224 of SEQ ID NO:194; amino acids 64 to 230 of SEQ ID NO:196; amino acids 64 to 230 of SEQ ID NO:198; and amino acids 64 to 230 of SEQ ID NO:200; or
[0190] b) a helicase conserved C-terminal domain having a sequence comprising amino acids 293 to 369 of SEQ ID NO:190; amino acids 298 to 374 of SEQ ID NO:192; amino acids 292 to 368 of SEQ ID NO:194; amino acids 298 to 374 of SEQ ID NO:196; amino acids 298 to 374 of SEQ ID NO:198; and amino acids 298 to 374 of SEQ ID NO:200.

[0191] Item 25 A transgenic plant transformed with an expression cassette comprising an isolated polynucleotide encoding TGF beta receptor interacting protein comprising a WD domain, G-beta repeat having a sequence selected from the group consisting of amino acids 42 to 80 of SEQ ID NO:154; amino acids 42 to 80 of SEQ ID NO:156; and amino acids 42 to 80 of SEQ ID NO:152; or a WD domain, G-beta repeat having a sequence selected from the group consisting of amino acids 136 to 174 of SEQ ID NO:154; amino acids 136 to 174 of SEQ ID NO:156; and amino acids 136 to 174 of SEQ ID NO:152; or a WD domain, G-beta repeat having a sequence selected from the group consisting of amino acids 181 to 219 of SEQ ID NO:154; amino acids 181 to 219 of SEQ ID NO:156; and amino acids 181 to 219 of SEQ ID NO:152; or a WD domain, G-beta repeat having a sequence selected from the group consisting of amino acids 278 to 316 of SEQ ID NO:154; amino acids 278 to 316 of SEQ ID NO:156; and amino acids 278 to 316 of SEQ ID NO:152.

[0192] Item 26 A transgenic plant transformed with an expression cassette comprising an isolated polynucleotide having a sequence selected from the group consisting of SEQ ID NO:173; SEQ ID NO:201; SEQ ID NO:203; and SEQ ID NO:205.

[0193] Item 27 An isolated polynucleotide having a sequence selected from the group consisting of the polynucleotide sequences set forth in Table 1.

[0194] Item 28 An isolated polypeptide having a sequence selected from the group consisting of the polypeptide sequences set forth in Table 1.

[0195] Item 29 A method of producing a transgenic plant comprising at least one polynucleotide listed in Table 1, wherein expression of the polynucleotide in the plant results in the plant's increased growth and/or yield under normal or water-limited conditions or increased tolerance to an environmental stress as compared to a wild type variety of the plant comprising the steps of:

(a) introducing into a plant cell an expression vector comprising at least one polynucleotide listed in Table 1, and
(b) generating from the plant cell a transgenic plant that expresses the polynucleotide, wherein expression of the polynucleotide in the transgenic plant results in the plant's increased growth or yield under normal or water-limited conditions and/or increased tolerance to environmental stress as compared to a wild type variety of the plant.

[0196] Item 30 A method of increasing a plant's growth or yield under normal or water-limited conditions or increasing a plant's tolerance to an environmental stress comprising the steps of:

(a) introducing into a plant cell an expression vector comprising at least one polynucleotide listed in Table 1, and
(b) generating from the plant cell a transgenic plant that expresses the polynucleotide, wherein expression of the polynucleotide in the transgenic plant results in the plant's increased growth or yield under normal or water-limited conditions and/or increased tolerance to environmental stress as compared to a wild type variety of the plant.

[0197] Item 31 A transgenic plant transformed with an expression cassette comprising an isolated polynucleotide encoding a full-length polypeptide comprising an AP2 domain having a sequence at least 64% identical to amino acids 44 to 99 of SEQ ID NO:208.

[0198] Item 32 The transgenic plant of item 31, wherein the polypeptide has a sequence selected from the group consisting of SEQ ID NO: 208, SEQ ID NO: 210, SEQ ID NO: 212, SEQ ID NO: 214, SEQ ID NO: 216, SEQ ID NO: 218, SEQ ID NO: 220, SEQ ID NO: 222, SEQ ID NO: 224, SEQ ID NO: 226, SEQ ID NO: 228, SEQ ID NO: 230, SEQ ID NO: 232, SEQ ID NO: 234, SEQ ID NO: 236, SEQ ID NO: 238, SEQ ID NO: 240, SEQ ID NO: 242, SEQ ID NO: 244, SEQ ID NO: 246, SEQ ID NO: 248, SEQ ID NO: 250, and SEQ ID NO: 252.

[0199] Item 33 An isolated polynucleotide having a sequence selected from the group consisting of the polynucleotide sequences set forth in Table 1.

[0200] Item 34 An isolated polypeptide having a sequence selected from the group consisting of the polypeptide sequences set forth in Table 1.

[0201] Item 35 A method of producing a transgenic plant comprising at least one polynucleotide listed in Table 1, wherein expression of the polynucleotide in the plant results in the plant's increased growth and/or yield under normal or water-limited conditions and/or increased tolerance to an environmental stress as compared to a wild type variety of the plant comprising the steps of:

(a) introducing into a plant cell an expression vector comprising at least one polynucleotide listed in Table 1, and
(b) generating from the plant cell a transgenic plant that expresses the polynucleotide, wherein expression of the polynucleotide in the transgenic plant results in the plant's increased growth and/or yield under normal or water-limited conditions and/or increased tolerance to environmental stress as compared to a wild type variety of the plant.

[0202] Item 36 A method of increasing a plant's growth and/or yield under normal or water-limited conditions and/or increasing a plant's tolerance to an environmental stress comprising the steps of increasing the expression of at least one polynucleotide listed in Table 1 in the plant.

[0203] Item 37 A transgenic plant transformed with an expression cassette comprising a polynucleotide encoding a full-length brassinosteroid biosynthetic LKB-like polypeptide selected from the group consisting of amino acids 1 to 566 of SEQ ID NO:254, CAN79299, AAK15493, P93472, AAM47602, and AAL91175.

[0204] Item 38 A transgenic plant transformed with an expression cassette comprising a polynucleotide encoding a full-length RING-box polypeptide comprising amino acids 1 to 120 of SEQ ID NO:256.

[0205] Item 39 A transgenic plant transformed with an expression cassette comprising an isolated polynucleotide encoding a full-length polypeptide having serine/threonine protein phosphatase activity, wherein the polypeptide comprises a calcineurin-like phosphoesterase domain having a sequence selected from the groups consisting of amino amino acids 44 to 239 of SEQ ID NO:258; amino acids 43 to 238 of SEQ ID NO:260; amino acids 54 to 249 of SEQ ID NO:262; amino acids 44 to 240 of SEQ ID NO:264; amino acids 43 to 238 of SEQ ID NO:266; amino acids 54 to 249 of SEQ ID NO:268; amino acids 48 to 243 of SEQ ID NO:270; amino acids 47 to 242 of SEQ ID NO:272; amino acids 54 to 249 of SEQ ID NO:274; amino acids 48 to 243 of SEQ ID NO:276; amino acids 47 to 242 of SEQ ID NO:278; amino acids 44 to 240 of SEQ ID NO:280; amino acids 47 to 242 of SEQ ID NO:282; amino acids 47 to 243 of SEQ ID NO:284; and amino acids 60 to 255 of SEQ ID NO:286.

[0206] Item 40 The transgenic plant of item 39, wherein the polypeptide has a sequence comprising amino acids 1 to 304 of SEQ ID NO:258; amino acids 1 to 303 of SEQ ID NO:260; amino acids 1 to 305 of SEQ ID NO:262; amino acids 1 to 313 of SEQ ID NO:264; amino acids 1 to 306 of SEQ ID NO:266; amino acids 1 to 306 of SEQ ID NO:268; amino acids 1 to 308 of SEQ ID NO:270; amino acids 1 to 314 of SEQ ID NO:272; amino acids 1 to 306 of SEQ ID NO:274; amino acids 1 to 313 of SEQ ID NO:276; amino acids 1 to 305 of SEQ ID NO:278; amino acids 1 to 303 of SEQ ID NO:280; amino acids 1 to 313 of SEQ ID NO:282; amino acids 1 to 307 of SEQ ID NO:284; or amino acids 1 to 306 of SEQ ID NO:286.

[0207] Item 41 An isolated polynucleotide having a sequence selected from the group consisting of the polynucleotide sequences set forth in Table 1.

[0208] Item 42 An isolated polypeptide having a sequence selected from the group consisting of the polypeptide sequences set forth in Table 1.

[0209] Item 43 A method of producing a transgenic plant comprising at least one polynucleotide listed in Table 1, wherein expression of the polynucleotide in the plant results in the plant's increased growth and/or yield under normal or water-limited conditions and/or increased tolerance to an environmental stress as compared to a wild type variety of the plant comprising the steps of:

(a) introducing into a plant cell an expression vector comprising at least one polynucleotide listed in Table 1, and
(b) generating from the plant cell a transgenic plant that expresses the polynucleotide, wherein expression of the polynucleotide in the transgenic plant results in the plant having increased growth or yield under normal or water-limited conditions or increased tolerance to environmental stress, as compared to a wild type variety of the plant.

[0210] Item 44 A method of increasing a plant's growth or yield under normal or water-limited conditions or increasing a plant's tolerance to an environmental stress comprising the steps of;

(a) introducing into a plant cell an expression vector comprising at least one polynucleotide listed in Table 1, and
(b) generating from the plant cell a transgenic plant that expresses the polynucleotide, wherein expression of the polynucleotide in the transgenic plant results in the plant having increased growth or yield under normal or water-limited conditions or increased tolerance to environmental stress, as compared to a wild type variety of the plant.

[0211] Item 45 A transgenic plant transformed with an expression cassette comprising, in operative association,
[0212] a) an isolated polynucleotide encoding a promoter capable of enhancing gene expression in leaves; and
[0213] b) an isolated polynucleotide encoding a full-length polypeptide which is a long-chain-fatty-acid-CoA ligase subunit of acyl-CoA synthetase;
   wherein the transgenic plant demonstrates increased yield as compared to a wild type plant of the same variety which does not comprise the expression cassette.

[0214] Item 46 The transgenic plant of item 45, wherein the long-chain-fatty-acid-CoA ligase comprises a domain selected from the group amino acids 213 to 543 of SEQ ID NO:288; amino acids 299 to 715 of SEQ ID NO:290; amino acids 173 to 504 of SEQ ID NO:292; amino acids 124 to 457 of SEQ ID NO:294; amino acids 178 to 509 of SEQ ID NO:296; amino acids 82 to 424 of SEQ ID NO:298; amino acids 207 to 388 of SEQ ID NO:300; amino acids 215 to 561 of SEQ ID NO:302; amino acids 111 to 476 of SEQ ID NO:304; amino acids 206 to 544 of SEQ ID NO:306; amino acids 192 to 531 of SEQ ID NO:308; amino acids 191 to 528 of SEQ ID NO:310; amino acids 259 to 660 of SEQ ID NO:312; amino acids 234 to 642 of SEQ ID NO:314; and amino acids 287 to 707 of SEQ ID NO:316.

[0215] Item 47 The transgenic plant of 2, wherein the long-chain-fatty-acid-CoA ligase comprises amino acids 1 to 561 of SEQ ID NO:288; amino acids 1 to 744 of SEQ ID NO:290; amino acids 1 to 518 of SEQ ID NO:292; amino acids 1 to 471 of SEQ ID NO:294; amino acids 1 to 523 of SEQ ID NO:296; amino acids 1 to 442 of SEQ ID NO:298; amino acids 1 to 555 of SEQ ID NO:300; amino acids 1 to 582 of SEQ ID NO:302; amino acids 1 to 455 of SEQ ID NO:304; amino acids 1 to 562 of SEQ ID NO:306; amino acids 1 to 547 of SEQ ID NO:308; amino acids 1 to 546 of SEQ ID NO:310; amino acids 1 to 691 of SEQ ID NO:312; amino acids 1 to 664 of SEQ ID NO:314; or amino acids 1 to 726 of SEQ ID NO:316.

[0216] Item 48 The transgenic plant of item 45, further defined as a species selected from the group consisting of maize, wheat, rice, soybean, cotton, oilseed rape, and canola.

[0217] Item 49 A seed which is true breeding for a transgene comprising, in operative association,
[0218] a) an isolated polynucleotide encoding a promoter capable of enhancing gene expression in leaves; and
[0219] b) an isolated polynucleotide encoding a full-length polypeptide which is a long-chain-fatty-acid-CoA ligase subunit of acyl-CoA synthetase;
   wherein a transgenic plant grown from said seed demonstrates increased tolerance to drought as compared to a wild type plant of the same variety which does not comprise the expression cassette.

[0220] Item 50 The seed of item 49, wherein the long-chain-fatty-acid-CoA ligase comprises a domain selected from the group amino acids 213 to 543 of SEQ ID NO:288; amino acids 299 to 715 of SEQ ID NO:290; amino acids 173 to 504 of SEQ ID NO:292; amino acids 124 to 457 of SEQ ID NO:294; amino acids 178 to 509 of SEQ ID NO:296; amino acids 82 to 424 of SEQ ID NO:298; amino acids 207 to 388 of SEQ ID NO:300; amino acids 215 to 561 of SEQ ID NO:302; amino acids 111 to 476 of SEQ ID NO:304; amino acids 206 to 544 of SEQ ID NO:306; amino acids 192 to 531 of SEQ ID NO:308; amino acids 191 to 528 of SEQ ID NO:310; amino acids 259 to 660 of SEQ ID NO:312; amino acids 234 to 642 of SEQ ID NO:314; and amino acids 287 to 707 of SEQ ID NO:316.

[0221] Item 51 The seed of item 50, wherein the long-chain-fatty-acid-CoA ligase comprises amino acids 1 to 561 of SEQ ID NO:288; amino acids 1 to 744 of SEQ ID NO:290; amino acids 1 to 518 of SEQ ID NO:292; amino acids 1 to 471 of SEQ ID NO:294; amino acids 1 to 523 of SEQ ID NO:296; amino acids 1 to 442 of SEQ ID NO:298; amino acids 1 to 555 of SEQ ID NO:300; amino acids 1 to 582 of SEQ ID NO:302; amino acids 1 to 455 of SEQ ID NO:304; amino acids 1 to 562 of SEQ ID NO:306; amino acids 1 to 547 of SEQ ID NO:308; amino acids 1 to 546 of SEQ ID NO:310; amino acids 1 to 691 of SEQ ID NO:312; amino acids 1 to 664 of SEQ ID NO:314; or amino acids 1 to 726 of SEQ ID NO:316.

[0222] Item 52 A method of producing a transgenic plant having enhanced yield as compared to a wild type plant of the same variety, the method comprising the steps of:
[0223] a) transforming a plant cell with an expression vector comprising, in operative association,
   [0224] i) an isolated polynucleotide encoding a promoter capable of enhancing gene expression in leaves; and
   [0225] ii) an isolated polynucleotide encoding a full-length polypeptide which is a long-chain-fatty-acid-CoA ligase subunit of acyl-CoA synthetase;
[0226] b) regenerating transgenic plants from the transformed plant cell; and
[0227] c) selecting higher-yielding plants from the regenerated transgenic plants.

[0228] Item 53 A transgenic plant transformed with an expression cassette comprising, in operative association,
[0229] a) an isolated polynucleotide encoding a promoter capable of enhancing gene expression in leaves; and
[0230] b) an isolated polynucleotide encoding a full-length beta-ketoacyl-ACP synthase polypeptide;
   wherein the transgenic plant demonstrates increased yield as compared to a wild type plant of the same variety which does not comprise the expression cassette.

[0231] Item 54 The transgenic plant of item 53, wherein the beta-ketoacyl-ACP synthase polypeptide comprises amino acids 1 to 379 of SEQ ID NO:318.

[0232] Item 55 The transgenic plant of item 53, further defined as a species selected from the group consisting of maize, wheat, rice, soybean, cotton, oilseed rape, and canola.

[0233] Item 56 A seed which is true breeding for a transgene comprising, in operative association,
[0234] a) an isolated polynucleotide encoding a promoter capable of enhancing gene expression in leaves; and
[0235] b) an isolated polynucleotide encoding a full-length beta-ketoacyl-ACP synthase polypeptide;
   wherein a transgenic plant grown from said seed demonstrates increased yield as compared to a wild type plant of the same variety which does not comprise the expression cassette.

[0236] Item 57 The seed of item 56, wherein the beta-ketoacyl-ACP synthase amino acids 1 to 379 of SEQ ID NO:318.

[0237] Item 58 A method of producing a transgenic plant having enhanced yield as compared to a wild type plant of the same variety, the method comprising the steps of:
[0238] a) transforming a plant cell with an expression vector comprising, in operative association,
   [0239] i) an isolated polynucleotide encoding a promoter capable of enhancing gene expression in leaves; and
   [0240] ii) an isolated polynucleotide encoding a full-length beta-ketoacyl-ACP synthase polypeptide;
[0241] b) regenerating transgenic plants from the transformed plant cell; and
[0242] c) selecting higher-yielding plants from the regenerated transgenic plants.

[0243] Item 59 A transgenic plant transformed with an expression cassette comprising, in operative association,
[0244] a) an isolated polynucleotide encoding a promoter capable of enhancing gene expression in leaves;
[0245] b) an isolated polynucleotide encoding a mitochondrial transit peptide; and
[0246] c) an isolated polynucleotide encoding a full-length polypeptide which is a subunit of acetyl-CoA carboxylase;
   wherein the transgenic plant demonstrates increased yield as compared to a wild type plant of the same variety which does not comprise the expression cassette.

[0247] Item 60 The transgenic plant of item 59, wherein the acetyl-CoA carboxylase subunit is selected from the group consisting of acetyl-CoA carboxylase alpha, biotin-dependent carboxylase, and biotin carboxyl carrier protein.

[0248] Item 61 The transgenic plant of item 60, wherein the acetyl-CoA carboxylase subunit is acetyl-CoA carboxylase alpha.

[0249] Item 62 The transgenic plant of item 61, wherein the acetyl-CoA carboxylase alpha comprises amino acids 1 to 319 of SEQ ID NO:320.

[0250] Item 63 The transgenic plant of item 60, wherein the acetyl-CoA carboxylase subunit is biotin-dependent carboxylase.

[0251] Item 64 The transgenic plant of item 63, wherein the biotin-dependent carboxylase comprises a domain selected from the group consisting of amino acids 3 to 308 of SEQ ID NO:322; amino acids 73 to 378 of SEQ ID NO:324; amino acids 38 to 344 of SEQ ID NO:326; and amino acids 73 to 378 of SEQ ID NO:328.

[0252] Item 65 The transgenic plant of item 64, wherein the biotin-dependent carboxylase comprises amino acids 1 to 449 of SEQ ID NO:322; amino acids 1 to 535 of SEQ ID NO:324; amino acids 1 to 732 of SEQ ID NO:326; or amino acids 1 to 539 of SEQ ID NO:328.

[0253] Item 66 The transgenic plant of item 60, wherein the acetyl-CoA carboxylase subunit is biotin carboxyl carrier protein.

[0254] Item 67 The transgenic plant of item 66, wherein the biotin carboxyl carrier protein comprises a domain selected from the group consisting of amino acids 79 to 152 of SEQ ID NO:330; amino acids 204 to 277 of SEQ ID NO:332; and amino acids 37 to 110 of SEQ ID NO:334.

[0255] Item 68 The transgenic plant of item 67, wherein the biotin carboxyl carrier protein subunit comprises amino acids 1 to 156 of SEQ ID NO:330; amino acids 1 to 282 of SEQ ID NO:332; or amino acids 1 to 115 of SEQ ID NO:334.

[0256] Item 69 The transgenic plant of item 66, further defined as a species selected from the group consisting of maize, wheat, rice, soybean, cotton, oilseed rape, and canola.

[0257] Item 70 A seed which is true breeding for a transgene comprising, in operative association,
[0258] a) an isolated polynucleotide encoding a promoter capable of enhancing gene expression in leaves;
[0259] b) an isolated polynucleotide encoding a mitochondrial transit peptide; and
[0260] c) an isolated polynucleotide encoding a full-length polypeptide which is a subunit of acetyl-CoA carboxylase;
   wherein a transgenic plant grown from said seed demonstrates increased yield as compared to a wild type plant of the same variety which does not comprise the expression cassette.

[0261] Item 71 The seed of item 70, wherein the acetyl-CoA carboxylase subunit is selected from the group consisting of acetyl-CoA carboxylase alpha, biotin-dependent carboxylase, and biotin carboxyl carrier protein.

[0262] Item 72 The seed of item 71, wherein the acetyl-CoA carboxylase subunit is acetyl-CoA carboxylase alpha.

[0263] Item 73 The seed of item 72, wherein the acetyl-CoA carboxylase alpha comprises amino acids 1 to 319 of SEQ ID NO:320.

[0264] Item 74 The seed of item 71, wherein the acetyl-CoA carboxylase subunit is biotin-dependent carboxylase.

[0265] Item 75 The seed of item 74, wherein the biotin-dependent carboxylase comprises a domain selected from the group consisting of amino acids 3 to 308 of SEQ ID NO:322; amino acids 73 to 378 of SEQ ID NO:324; amino acids 38 to 344 of SEQ ID NO:326; and amino acids 73 to 378 of SEQ ID NO:328.

[0266] Item 76 The seed of item 75, wherein the biotin-dependent carboxylase comprises amino acids 1 to 449 of SEQ ID NO:322; amino acids 1 to 535 of SEQ ID NO:324; amino acids 1 to 732 of SEQ ID NO:326; or amino acids 1 to 539 of SEQ ID NO:328.

[0267] Item 77 The seed of item 71, wherein the acetyl-CoA carboxylase subunit is biotin carboxyl carrier protein.

[0268] Item 78 The seed of item 77, wherein the biotin carboxyl carrier protein comprises a domain selected from the group consisting of amino acids 79 to 152 of SEQ ID NO:330; amino acids 204 to 277 of SEQ ID NO:332; and amino acids 37 to 110 of SEQ ID NO:334.

[0269] Item 79 The seed of item 78, wherein the biotin carboxyl carrier protein subunit comprises amino acids 1 to 156 of SEQ ID NO:330; amino acids 1 to 282 of SEQ ID NO:332; or amino acids 1 to 115 of SEQ ID NO:334.

[0270] Item 80 A method of producing a transgenic plant having enhanced yield as compared to a wild type plant of the same variety, the method comprising the steps of:
[0271] a) transforming a plant cell with an expression vector comprising, in operative association,
   [0272] i) an isolated polynucleotide encoding a promoter capable of enhancing gene expression in leaves;
   [0273] ii) an isolated polynucleotide encoding a mitochondrial transit peptide; and
   [0274] iii) an isolated polynucleotide encoding a full-length polypeptide which is a subunit of acetyl-CoA carboxylase;
[0275] b) regenerating transgenic plants from the transformed plant cell; and
[0276] c) selecting higher-yielding plants from the regenerated transgenic plants.

[0277] Item 81 A transgenic plant transformed with an expression cassette comprising, in operative association,
[0278] a) an isolated polynucleotide encoding a promoter capable of enhancing gene expression in leaves;
[0279] b) an isolated polynucleotide encoding a mitochondrial transit peptide; and
[0280] c) an isolated polynucleotide encoding a full-length 3-oxoacyl-[ACP] synthase II polypeptide;
   wherein the transgenic plant demonstrates increased yield as compared to a wild type plant of the same variety which does not comprise the expression cassette.

[0281] Item 82 The transgenic plant of item 81, wherein the 3-oxoacyl-ACP synthase II polypeptide comprises a domain selected from the group consisting of amino acids 12 to 410 of SEQ ID NO:336; amino acids 2 to 401 of SEQ ID NO:338; amino acids 55 to 456 of SEQ ID NO:340; and amino acids 2 to 401 of SEQ ID NO:342.

[0282] Item 83 The transgenic plant of item 82, wherein the 3-oxoacyl-ACP synthase II comprising amino acids 1 to 413 of SEQ ID NO:336; amino acids 1 to 406 of SEQ ID NO:338; amino acids 1 to 461 of SEQ ID NO:340; amino acids 1 to 406 of SEQ ID NO:342.

[0283] Item 84 The transgenic plant of item 81, further defined as a species selected from the group consisting of maize, wheat, rice, soybean, cotton, oilseed rape, and canola.

[0284] Item 85 A seed which is true breeding for a transgene comprising, in operative association,
[0285] a) an isolated polynucleotide encoding a promoter capable of enhancing gene expression in leaves;
[0286] b) an isolated polynucleotide encoding a mitochondrial transit peptide; and
[0287] c) an isolated polynucleotide encoding a full-length 3-oxoacyl-[ACP] synthase II polypeptide;
   wherein a transgenic plant grown from said seed demonstrates increased yield as compared to a wild type plant of the same variety which does not comprise the transgene.

[0288] Item 86 The seed of item 85, wherein the 3-oxoacyl-ACP synthase II polypeptide comprises a domain selected from the group consisting of amino acids 12 to 410 of SEQ ID NO:336; amino acids 2 to 401 of SEQ ID NO:338; amino acids 55 to 456 of SEQ ID NO:340; and amino acids 2 to 401 of SEQ ID NO:342.

[0289] Item 87 The seed of item 86, wherein the 3-oxoacyl-ACP synthase II comprising amino acids 1 to 413 of SEQ ID NO:336; amino acids 1 to 406 of SEQ ID NO:338; amino acids 1 to 461 of SEQ ID NO:340; amino acids 1 to 406 of SEQ ID NO:342.

[0290] Item 88 A method of producing a transgenic plant having enhanced yield as compared to a wild type plant of the same variety, the method comprising the steps of:
[0291] a) transforming a plant cell with an expression vector comprising, in operative association,
   [0292] i) an isolated polynucleotide encoding a promoter capable of enhancing gene expression in leaves;
   [0293] ii) an isolated polynucleotide encoding a mitochondrial transit peptide; and
   [0294] iii) an isolated polynucleotide encoding a full-length 3-oxoacyl-[ACP] synthase II polypeptide;
[0295] b) regenerating transgenic plants from the transformed plant cell; and
[0296] c) selecting higher-yielding plants from the regenerated transgenic plants.

[0297] Item 89 A transgenic plant transformed with an expression cassette comprising, in operative association,
[0298] a) an isolated polynucleotide encoding a promoter; and
[0299] b) an isolated polynucleotide encoding a full-length 3-oxoacyl-[ACP] reductase polypeptide;
   wherein the transgenic plant demonstrates increased yield as compared to a wild type plant of the same variety which does not comprise the expression cassette.

[0300] Item 90 The transgenic plant of item 89, wherein the promoter is capable of enhancing expression in leaves.

[0301] Item 91 The transgenic plant of item 89, wherein the expression vector further comprises a mitochondrial transit peptide.

[0302] Item 92 The transgenic plant of item 89, wherein the expression vector further comprises a chloroplast transit peptide.

[0303] Item 93 The transgenic plant of item 89, wherein the 3-oxoacyl-[ACP] reductase polypeptide comprises a domain selected from the group consisting of amino acids 80 to 181 of SEQ ID NO:344; amino acids 85 to 186 of SEQ ID NO:346; amino acids 79 to 180 of SEQ ID NO:348; amino acids 69 to 170 of SEQ ID NO:350; amino acids 51 to 154 of SEQ ID NO:352; amino acids 156 to 257 of SEQ ID NO:354; amino acids 90 to 193 of SEQ ID NO:356; amino acids 81 to 184 of SEQ ID NO:358; amino acids 128 to 228 of SEQ ID NO:360; amino acids 96 to 197 of SEQ ID NO:362; amino acids 97 to 198 of SEQ ID NO:364; amino acids 95 to 198 of SEQ ID NO:366; amino acids 103 to 208 of SEQ ID NO:368; amino acids 103 to 208 of SEQ ID NO:370; amino acids 100 to 203 of SEQ ID NO:372; amino acids 96 to 197 of SEQ ID NO:374; amino acids 96 to 197 of SEQ ID NO:376; amino acids 89 to 192 of SEQ ID NO:378; amino acids 159 to 260 of SEQ ID NO:380; amino acids 88 to 187 of SEQ ID NO:382; amino acids 148 to 249 of SEQ ID NO:384; amino acids 98 to 202 of SEQ ID NO:386; amino acids 95 to 199 of SEQ ID NO:388; amino acids 154 to 257 of SEQ ID NO:390; amino acids 88 to 187 of SEQ ID NO:392; amino acids 100 to 201 of SEQ ID NO:394; and amino acids 88 to 187 of SEQ ID NO:396.

[0304] Item 94 The transgenic plant of item 93, wherein the 3-oxoacyl-ACP reductase polypeptide comprises amino acids 1 to 244 of SEQ ID NO:344; amino acids 1 to 247 of SEQ ID NO:346; amino acids 1 to 253 of SEQ ID NO:348; amino acids 1 to 243 of SEQ ID NO:350; amino acids 1 to 236 of SEQ ID NO:352; amino acids 1 to 320 of SEQ ID NO:354; amino acids 1 to 275 of SEQ ID NO:356; amino acids 1 to 260 of SEQ ID NO:358; amino acids 1 to 294 of SEQ ID NO:360; amino acids 1 to 267 of SEQ ID NO:362; amino acids 1 to 272 of SEQ ID NO:364; amino acids 1 to 280 of SEQ ID NO:366; amino acids 1 to 282 of SEQ ID NO:368; amino acids 1 to 282 of SEQ ID NO:370; amino acids 1 to 265 of SEQ ID NO:372; amino acids 1 to 264 of SEQ ID NO:374; amino acids 1 to 271 of SEQ ID NO:376; amino acids 1 to 256 of SEQ ID NO:378; amino acids 1 to 323 of SEQ ID NO:380; amino acids 1 to 249 of SEQ ID NO:382; amino acids 1 to 312 of SEQ ID NO:384; amino acids 1 to 246 of SEQ ID NO:386; amino acids 1 to 258 of SEQ ID NO:388; amino acids 1 to 320 of SEQ ID NO:390; amino acids 1 to 253 of SEQ ID NO:392; amino acids 1 to 273 of SEQ ID NO:394; or amino acids 1 to 253 of SEQ ID NO:396.

[0305] Item 95 The transgenic plant of item 89, further defined as a species selected from the group consisting of maize, wheat, rice, soybean, cotton, oilseed rape, and canola.

[0306] Item 96 A seed which is true breeding for a transgene comprising, in operative association,
[0307] a) an isolated polynucleotide encoding a promoter; and
[0308] b) an isolated polynucleotide encoding a full-length 3-oxoacyl-[ACP] reductase polypeptide;
   wherein a transgenic plant grown from said seed demonstrates increased yield as compared to a wild type plant of the same variety which does not comprise the expression cassette.

[0309] Item 97 The seed of item 96, wherein the promoter is capable of enhancing expression in leaves.

[0310] Item 98 The seed of item 97, wherein the expression vector further comprises a mitochondrial transit peptide.

[0311] Item 99 The seed of item 96, wherein the expression vector further comprises a chloroplast transit peptide.

[0312] Item 100 The seed of item 96, wherein the 3-oxoacyl-[ACP] reductase polypeptide comprises a domain selected from the group consisting of amino acids 80 to 181 of SEQ ID NO:344; amino acids 85 to 186 of SEQ ID NO:346; amino acids 79 to 180 of SEQ ID NO:348; amino acids 69 to 170 of SEQ ID NO:350; amino acids 51 to 154 of SEQ ID NO:352; amino acids 156 to 257 of SEQ ID NO:354; amino acids 90 to 193 of SEQ ID NO:356; amino acids 81 to 184 of SEQ ID NO:358; amino acids 128 to 228 of SEQ ID NO:360; amino acids 96 to 197 of SEQ ID NO:362; amino acids 97 to 198 of SEQ ID NO:364; amino acids 95 to 198 of SEQ ID NO:366; amino acids 103 to 208 of SEQ ID NO:368; amino acids 103 to 208 of SEQ ID NO:370; amino acids 100 to 203 of SEQ ID NO:372; amino acids 96 to 197 of SEQ ID NO:374; amino acids 96 to 197 of SEQ ID NO:376; amino acids 89 to 192 of SEQ ID NO:378; amino acids 159 to 260 of SEQ ID NO:380; amino acids 88 to 187 of SEQ ID NO:382; amino acids 148 to 249 of SEQ ID NO:384; amino acids 98 to 202 of SEQ ID NO:386; amino acids 95 to 199 of SEQ ID NO:388; amino acids 154 to 257 of SEQ ID NO:390; amino acids 88 to 187 of SEQ ID NO:392; amino acids 100 to 201 of SEQ ID NO:394; and amino acids 88 to 187 of SEQ ID NO:396.

[0313] Item 101 The seed of item 100, wherein the 3-oxoacyl-ACP reductase polypeptide comprises amino acids 1 to 244 of SEQ ID NO:344; amino acids 1 to 247 of SEQ ID NO:346; amino acids 1 to 253 of SEQ ID NO:348; amino acids 1 to 243 of SEQ ID NO:350; amino acids 1 to 236 of SEQ ID NO:352; amino acids 1 to 320 of SEQ ID NO:354; amino acids 1 to 275 of SEQ ID NO:356; amino acids 1 to 260 of SEQ ID NO:358; amino acids 1 to 294 of SEQ ID NO:360; amino acids 1 to 267 of SEQ ID NO:362; amino acids 1 to 272 of SEQ ID NO:364; amino acids 1 to 280 of SEQ ID NO:366; amino acids 1 to 282 of SEQ ID NO:368; amino acids 1 to 282 of SEQ ID NO:370; amino acids 1 to 265 of SEQ ID NO:372; amino acids 1 to 264 of SEQ ID NO:374; amino acids 1 to 271 of SEQ ID NO:376; amino acids 1 to 256 of SEQ ID NO:378; amino acids 1 to 323 of SEQ ID NO:380; amino acids 1 to 249 of SEQ ID NO:382; amino acids 1 to 312 of SEQ ID NO:384; amino acids 1 to 246 of SEQ ID NO:386; amino acids 1 to 258 of SEQ ID NO:388; amino acids 1 to 320 of SEQ ID NO:390; amino acids 1 to 253 of SEQ ID NO:392; amino acids 1 to 273 of SEQ ID NO:394; or amino acids 1 to 253 of SEQ ID NO:396.

[0314] Item 102 A method of producing a transgenic plant having enhanced yield as compared to a wild type plant of the same variety, the method comprising the steps of:
[0315] a) transforming a plant cell with an expression vector comprising, in operative association,
   [0316] i) an isolated polynucleotide encoding a promoter; and
   [0317] ii) an isolated polynucleotide encoding a full-length 3-oxoacyl-[ACP] reductase polypeptide;
[0318] b) regenerating transgenic plants from the transformed plant cell; and
[0319] c) selecting higher-yielding plants from the regenerated transgenic plants.

[0320] Item 103 The method of item 102, wherein the promoter is capable of enhancing expression in leaves.

[0321] Item 104 The method of item 103, wherein the expression vector further comprises a mitochondrial transit peptide.

[0322] Item 105 The method of item 102, wherein the expression vector further comprises a chloroplast transit peptide.

[0323] Item 106 A transgenic plant transformed with an expression cassette comprising, in operative association,
[0324] a) an isolated polynucleotide encoding a promoter;
[0325] b) an isolated polynucleotide encoding a mitochondrial transit peptide, and
[0326] c) an isolated polynucleotide encoding a full-length biotin synthetase polypeptide;
   wherein the transgenic plant demonstrates increased yield as compared to a wild type plant of the same variety which does not comprise the expression cassette.

[0327] Item 107 The transgenic plant of item 105, wherein the biotin synthetase comprises a domain selected from the group consisting of amino acids 78 to 300 of SEQ ID NO:398; amino acids 82 to 301 of SEQ ID NO:400; and amino acids 79 to 298 of SEQ ID NO:402.

[0328] Item 108 The transgenic plant of item 107, wherein the biotin synthetase comprises amino acids 1 to 362 of SEQ ID NO:398; amino acids 1 to 304 of SEQ ID NO:400; or amino acids 1 to 372 of SEQ ID NO:402.

[0329] Item 109 The transgenic plant of item 106, further defined as a species selected from the group consisting of maize, wheat, rice, soybean, cotton, oilseed rape, and canola.

[0330] Item 110 A seed which is true breeding for a transgene comprising, in operative association,
[0331] a) an isolated polynucleotide encoding a promoter;
[0332] b) an isolated polynucleotide encoding a mitochondrial transit peptide, and
[0333] c) an isolated polynucleotide encoding a full-length biotin synthetase polypeptide;
   wherein a transgenic plant grown from said seed demonstrates increased yield as compared to a wild type plant of the same variety which does not comprise the expression cassette.

[0334] Item 111 The seed of item 110, wherein the biotin synthetase comprises a domain selected from the group consisting of amino acids 78 to 300 of SEQ ID NO:398; amino acids 82 to 301 of SEQ ID NO:400; and amino acids 79 to 298 of SEQ ID NO:402.

[0335] Item 112 The seed of item 111, wherein the biotin synthetase comprises amino acids 1 to 362 of SEQ ID NO:398; amino acids 1 to 304 of SEQ ID NO:400; or amino acids 1 to 372 of SEQ ID NO:402.

[0336] Item 113 A method of producing a transgenic plant having enhanced yield as compared to a wild type plant of the same variety, the method comprising the steps of:
[0337] a) transforming a plant cell with an expression vector comprising, in operative association,
   [0338] i) an isolated polynucleotide encoding a promoter;
   [0339] ii) an isolated polynucleotide encoding a mitochondrial transit peptide, and
   [0340] iii) an isolated polynucleotide encoding a full-length biotin synthetase polypeptide;
[0341] b) regenerating transgenic plants from the transformed plant cell; and
[0342] c) selecting higher-yielding plants from the regenerated transgenic plants.

[0343] Item 114 An isolated polynucleotide having a sequence selected from the group consisting of SEQ ID NO:291; SEQ ID NO:293; SEQ ID NO:295; SEQ ID NO:297; SEQ ID NO:299; SEQ ID NO:301; SEQ ID NO:303; SEQ ID NO:311; SEQ ID NO:313; SEQ ID NO:315; SEQ ID NO:331; SEQ ID NO:333; SEQ ID NO:337; SEQ ID NO:339; SEQ ID NO:341; SEQ ID NO:347; SEQ ID NO:349; SEQ ID NO:351; SEQ ID NO:353; SEQ ID NO:355; SEQ ID NO:357; SEQ ID NO:359; SEQ ID NO:361; SEQ ID NO:363; SEQ ID NO:365; SEQ ID NO:367; SEQ ID NO:369; SEQ ID NO:371; SEQ ID NO:373; SEQ ID NO:375; SEQ ID NO:377; SEQ ID NO:379; SEQ ID NO:383; SEQ ID NO:385; SEQ ID NO:387; SEQ ID NO:389; SEQ ID NO:391; SEQ ID NO:393; SEQ ID NO:395; SEQ ID NO:399; and SEQ ID NO:401.

[0344] Item 115 An isolated polynucleotide encoding a polypeptide having an amino acid sequence selected from the group consisting of SEQ ID NO:292; SEQ ID NO:294; SEQ ID NO:296; SEQ ID NO:298; SEQ ID NO:300; SEQ ID NO:302; SEQ ID NO:304; SEQ ID NO:312; SEQ ID NO:314; SEQ ID NO:316; SEQ ID NO:332; SEQ ID NO:334; SEQ ID NO:338; SEQ ID NO:340; SEQ ID NO:342; SEQ ID NO:348; SEQ ID NO:350; SEQ ID NO:352; SEQ ID NO:354; SEQ ID NO:356; SEQ ID NO:358; SEQ ID NO:360; SEQ ID NO:362; SEQ ID NO:364; SEQ ID NO:366; SEQ ID NO:368; SEQ ID NO:370; SEQ ID NO:372; SEQ ID NO:374; SEQ ID NO:376; SEQ ID NO:378; SEQ ID NO:380; SEQ ID NO:384; SEQ ID NO:386; SEQ ID NO:388; SEQ ID NO:390; SEQ ID NO:392; SEQ ID NO:394; SEQ ID NO:396; SEQ ID NO:400; and SEQ ID NO:402.

[0345] Item 116 A method of high-throughput screening of transgenic plants for yield-related phenotypes, the method comprising the steps of:
[0346] a) forming at least one pool of transgenic plants, each transgenic plant comprising a transgene in an expression cassette;
[0347] b) growing the pooled transgenic plants under well watered and water limited growth conditions in a primary screen;
[0348] c) selecting transgenic plants that demonstrate an undiminished biomass under water limited growth conditions in the primary screen;
[0349] d) determining the molecular identity of each element in the expression cassette in each selected transgenic plant;
[0350] e) growing the transgenic plants selected in step c) under well watered and water limited growth conditions in a secondary screen;
[0351] f) selecting transgenic plants that demonstrate an undiminished biomass under water limited growth conditions in the secondary screen;
[0352] g) growing the transgenic plants selected in step f) under well watered and water limited growth conditions in a tertiary screen; and
[0353] h) selecting transgenic plants that demonstrate an undiminished biomass under water limited growth conditions in the tertiary screen;
   wherein:
[0354] the well watered growth conditions consist of watering to soil saturation twice a week and determining biomass and health index on days 17 and 21 after sowing; and the water limited growth conditions consist of watering to soil saturation on days 0, 8, and 19 after sowing, and determining biomass and health index on days 20 and 27 after sowing.

[0355] Item 117 A transgenic plant transformed with an expression cassette comprising, in operative association,
[0356] a) an isolated polynucleotide encoding a promoter capable of enhancing gene expression in leaves;
[0357] b) an isolated polynucleotide encoding a mitochondrial transit peptide; and
[0358] c) an isolated polynucleotide encoding a full-length farnesyl diphosphate synthase polypeptide;
   wherein the transgenic plant demonstrates increased yield as compared to a wild type plant of the same variety which does not comprise the expression cassette.

[0359] Item 118 The transgenic plant of item 117, wherein the farnesyl diphosphate synthase polypeptide comprises a polyprenyl synthetase domain comprising a pair of signature sequences, wherein:
[0360] a) one member of the pair is selected from the group consisting of amino acids 81 to 125 of SEQ ID NO:414; amino acids 97 to 139 of SEQ ID NO:416; amino acids 76 to 120 of SEQ ID NO:418; amino acids 116 to 160 of SEQ ID NO:420; amino acids 90 to 132 of SEQ ID NO:422; amino acids 7 to 51 of SEQ ID NO:424; amino acids 46 to 90 of SEQ ID NO:426; amino acids 7 to 49 of SEQ ID NO:428; amino acids 19 to 61 of SEQ ID NO:430; amino acids 7 to 49 of SEQ ID NO:432; and amino acids 98 to 140 of SEQ ID NO:434; and
[0361] b) the other member of the pair of signature sequences is selected from the group consisting of amino acids 193 to 227 of SEQ ID NO:414; amino acids 210 to 244 of SEQ ID NO:416; amino acids 191 to 224 of SEQ ID NO:418; amino acids 224 to 257 of SEQ ID NO:420; amino acids 203 to 236 of SEQ ID NO:422; amino acids 115 to 148 of SEQ ID NO:424; amino acids 158 to 191 of SEQ ID NO:426; amino acids 108 to 141 of SEQ ID NO:428; amino acids 132 to 165 of SEQ ID NO:430; amino acids 108 to 141 of SEQ ID NO:432; and amino acids 211 to 244 of SEQ ID NO:434.

[0362] Item 119 The transgenic plant of item 117, wherein the farnesyl diphosphate synthase polypeptide has a sequence comprising amino acids 1 to 299 of SEQ ID NO:414; amino acids 1 to 352 of SEQ ID NO:416; amino acids 1 to 294 of SEQ ID NO:418; amino acids 1 to 274 of SEQ ID NO:420; amino acids 1 to 342 of SEQ ID NO:422; amino acids 1 to 222 of SEQ ID NO:424; amino acids 1 to 261 of SEQ ID NO:426; amino acids 1 to 161 of SEQ ID NO:428; amino acids 1 to 174 of SEQ ID NO:430; amino acids 1 to 245 of SEQ ID NO:432; or amino acids 1 to 350 of SEQ ID NO:434.

[0363] Item 120 The transgenic plant of item 117, further defined as a species selected from the group consisting of maize, wheat, rye, oat, triticale, rice, barley, soybean, peanut, cotton, rapeseed, canola, manihot, pepper, sunflower, tagetes, potato, tobacco, eggplant, tomato, Vicia species, pea, alfalfa, coffee, cacao, tea, Salix species, oil palm, coconut, perennial grasses, and a forage crop plant.

[0364] Item 121 A seed which is true breeding for a transgene comprising, in operative association,
[0365] a) an isolated polynucleotide encoding a promoter capable of enhancing gene expression in leaves;
[0366] b) an isolated polynucleotide encoding a mitochondrial transit peptide; and
[0367] c) an isolated polynucleotide encoding a full-length farnesyl diphosphate synthase polypeptide;
   wherein a transgenic plant grown from said seed demonstrates increased yield as compared to a wild type plant of the same variety which does not comprise the expression cassette.

[0368] Item 122 The seed of item 121, wherein he farnesyl diphosphate synthase polypeptide comprises a polyprenyl synthetase domain comprising a pair of signature sequences, wherein:
[0369] a) one member of the pair is selected from the group consisting of amino acids 81 to 125 of SEQ ID NO:414; amino acids 97 to 139 of SEQ ID NO:416; amino acids 76 to 120 of SEQ ID NO:418; amino acids 116 to 160 of SEQ ID NO:420; amino acids 90 to 132 of SEQ ID NO:422; amino acids 7 to 51 of SEQ ID NO:424; amino acids 46 to 90 of SEQ ID NO:426; amino acids 7 to 49 of SEQ ID NO:428; amino acids 19 to 61 of SEQ ID NO:430; amino acids 7 to 49 of SEQ ID NO:432; and amino acids 98 to 140 of SEQ ID NO:434; and
[0370] b) the other member of the pair of signature sequences is selected from the group consisting of amino acids 193 to 227 of SEQ ID NO:414; amino acids 210 to 244 of SEQ ID NO:416; amino acids 191 to 224 of SEQ ID NO:418; amino acids 224 to 257 of SEQ ID NO:420; amino acids 203 to 236 of SEQ ID NO:422; amino acids 115 to 148 of SEQ ID NO:424; amino acids 158 to 191 of SEQ ID NO:426; amino acids 108 to 141 of SEQ ID NO:428; amino acids 132 to 165 of SEQ ID NO:430; amino acids 108 to 141 of SEQ ID NO:432; and amino acids 211 to 244 of SEQ ID NO:434.

[0371] Item 123 The seed of item 121, wherein the farnesyl diphosphate synthase polypeptide has a sequence comprising amino acids 1 to 299 of SEQ ID NO:414; amino acids 1 to 352 of SEQ ID NO:416; amino acids 1 to 294 of SEQ ID NO:418; amino acids 1 to 274 of SEQ ID NO:420; amino acids 1 to 342 of SEQ ID NO:422; amino acids 1 to 222 of SEQ ID NO:424; amino acids 1 to 261 of SEQ ID NO:426; amino acids 1 to 161 of SEQ ID NO:428; amino acids 1 to 174 of SEQ ID NO:430; amino acids 1 to 245 of SEQ ID NO:432; or amino acids 1 to 350 of SEQ ID NO:434.

[0372] Item 124 The seed of item 121, further defined as a species selected from the group consisting of maize, wheat, rye, oat, triticale, rice, barley, soybean, peanut, cotton, rapeseed, canola, manihot, pepper, sunflower, tagetes, potato, tobacco, eggplant, tomato, Vicia species, pea, alfalfa, coffee, cacao, tea, Salix species, oil palm, coconut, perennial grasses, and a forage crop plant.

[0373] Item 125 A method of increasing yield of a plant, the method comprising the steps of:
[0374] a) transforming a plant cell with an expression vector comprising, in operative association,
   [0375] i) an isolated polynucleotide encoding a promoter capable of enhancing gene expression in leaves;
   [0376] ii) an isolated polynucleotide encoding a mitochondrial transit peptide; and
   [0377] iii) an isolated polynucleotide encoding a full-length farnesyl diphosphate synthase polypeptide;
[0378] b) regenerating transgenic plants from the transformed plant cell; and
[0379] c) selecting drought-tolerant plants from the regenerated transgenic plants.

[0380] Item 126 A transgenic plant transformed with an expression cassette comprising, in operative association,
[0381] a) an isolated polynucleotide encoding a promoter;
[0382] b) an isolated polynucleotide encoding a chloroplast transit peptide; and
[0383] c) an isolated polynucleotide encoding a full-length squalene synthase polypeptide;
   wherein the transgenic plant demonstrates increased yield as compared to a wild type plant of the same variety which does not comprise the expression cassette.

[0384] Item 127 The transgenic plant of item 126, wherein the squalene synthase polypeptide comprises a squalene synthetase domain comprising a pair of signature sequences, wherein:
[0385] a) one member of the pair has a sequence selected from the group consisting of amino acids 201 to 216 of SEQ ID NO:436; amino acids 201 to 216 of SEQ ID NO:438; amino acids 168 to 183 of SEQ ID NO:440; amino acids 168 to 183 of SEQ ID NO:442; and amino acids 164 to 179 of SEQ ID NO:444; and
[0386] b) the other member of the pair of signature sequences has a sequence selected from the group consisting of amino acids 234 to 262 of SEQ ID NO:436; amino acids 234 to 262 of SEQ ID NO:438; amino acids 203 to 231 of SEQ ID NO:440; amino acids 201 to 229 of SEQ ID NO:442; and amino acids 197 to 225 of SEQ ID NO:444.

[0387] Item 128 The transgenic plant of item 126, wherein the squalene synthase polypeptide comprises a squalene synthetase domain selected from the group consisting of amino acids 95 to 351 of SEQ ID NO:436; amino acids 95 to 351 of SEQ ID NO:438; amino acids 62 to 320 of SEQ ID NO:440; amino acids 62 to 318 of SEQ ID NO:442; and amino acids 58 to 314 of SEQ ID NO:444.

[0388] Item 129 The transgenic plant of item 126, wherein the squalene synthase polypeptide comprises amino acids 1 to 436 of SEQ ID NO:436; amino acids 1 to 436 of SEQ ID NO:438; amino acids 1 to 357 of SEQ ID NO:440; amino acids 1 to 413 of SEQ ID NO:442; or amino acids 1 to 401 of SEQ ID NO:444.

[0389] Item 130 The transgenic plant of item 126, further defined as a species selected from the group consisting of maize, wheat, rye, oat, triticale, rice, barley, soybean, peanut, cotton, rapeseed, canola, manihot, pepper, sunflower, tagetes, potato, tobacco, eggplant, tomato, Vicia species, pea, alfalfa, coffee, cacao, tea, Salix species, oil palm, coconut, perennial grasses, and a forage crop plant.

[0390] Item 131 A seed which is true breeding for a transgene comprising, in operative association,
[0391] a) an isolated polynucleotide encoding a promoter;
[0392] b) an isolated polynucleotide encoding a chloroplast transit peptide; and
[0393] c) an isolated polynucleotide encoding a full-length squalene synthase polypeptide;
   wherein a transgenic plant grown from said seed demonstrates increased yield as compared to a wild type plant of the same variety which does not comprise the expression cassette.

[0394] Item 132 The seed of item 131, wherein the squalene synthase polypeptide comprises a squalene synthetase domain comprising a pair of signature sequences, wherein:
[0395] a) one member of the pair has a sequence selected from the group consisting of amino acids 201 to 216 of SEQ ID NO:436; amino acids 201 to 216 of SEQ ID NO:438; amino acids 168 to 183 of SEQ ID NO:440; amino acids 168 to 183 of SEQ ID NO:442; and amino acids 164 to 179 of SEQ ID NO:444; and
[0396] b) the other member of the pair of signature sequences has a sequence selected from the group consisting of amino acids 234 to 262 of SEQ ID NO:436; amino acids 234 to 262 of SEQ ID NO:438; amino acids 203 to 231 of SEQ ID NO:440; amino acids 201 to 229 of SEQ ID NO:442; and amino acids 197 to 225 of SEQ ID NO:444.

[0397] Item 133 The seed of item 131, wherein the squalene synthase polypeptide comprises a squalene synthetase domain selected from the group consisting of amino acids 95 to 351 of SEQ ID NO:436; amino acids 95 to 351 of SEQ ID NO:438; amino acids 62 to 320 of SEQ ID NO:440; amino acids 62 to 318 of SEQ ID NO:442; and amino acids 58 to 314 of SEQ ID NO:444.

[0398] Item 134 The seed of item 131, wherein the squalene synthase polypeptide comprises amino acids 1 to 436 of SEQ ID NO:436; amino acids 1 to 436 of SEQ ID NO:438; amino acids 1 to 357 of SEQ ID NO:440; amino acids 1 to 413 of SEQ ID NO:442; or amino acids 1 to 401 of SEQ ID NO:444.

[0399] Item 135 The seed of item 131, further defined as a species selected from the group consisting of maize, wheat, rye, oat, triticale, rice, barley, soybean, peanut, cotton, rapeseed, canola, manihot, pepper, sunflower, tagetes, potato, tobacco, eggplant, tomato, Vicia species, pea, alfalfa, coffee, cacao, tea, Salix species, oil palm, coconut, perennial grasses, and a forage crop plant.

[0400] Item 136 A method of producing a transgenic plant having enhanced yield as compared to a wild type plant of the same variety, the method comprising the steps of:
[0401] a) transforming a plant cell with an expression vector comprising, in operative association,
   [0402] i) an isolated polynucleotide encoding a promoter;
   [0403] ii) an isolated polynucleotide encoding a chloroplast transit peptide; and
   [0404] iii) an isolated polynucleotide encoding a full-length squalene synthase polypeptide;
[0405] b) regenerating transgenic plants from the transformed plant cell; and
[0406] c) selecting higher-yielding plants from the regenerated transgenic plants.

[0407] Item 137 A transgenic plant transformed with an expression cassette comprising, in operative association,
[0408] a) an isolated polynucleotide encoding a promoter;
[0409] b) an isolated polynucleotide encoding a chloroplast transit peptide; and
[0410] c) an isolated polynucleotide encoding a full-length squalene epoxidase polypeptide;
   wherein the transgenic plant demonstrates increased yield as compared to a wild type plant of the same variety which does not comprise the expression cassette.

[0411] Item 138 The transgenic plant of item 137, wherein the squalene epoxidase polypeptide comprises a domain comprising a pair of FAD-dependent enzyme motifs, wherein:
[0412] a) one member of the pair has a sequence selected from the group consisting of amino acids 55 to 66 of SEQ ID NO:446; amino acids 79 to 90 of SEQ ID NO:448; and amino acids 98 to 109 of SEQ ID NO:450; and
[0413] b) the other member of the pair has a sequence selected from the group consisting of amino acids 334 to 350 of SEQ ID NO:446; amino acids 331 to 347 of SEQ ID NO:448; and amino acids 347 to 363 of SEQ ID NO:450.

[0414] Item 139 The transgenic plant of item 137, wherein the squalene epoxidase polypeptide comprises a domain selected from the group consisting of amino acids 20 to 488 of SEQ ID NO:446; amino acids 44 to 483 of SEQ ID NO:448; and amino acids 63 to 500 of SEQ ID NO:450.

[0415] Item 140 The transgenic plant of item 137, wherein the squalene epoxidase polypeptide amino acids 1 to 496 of SEQ ID NO:446; amino acids 1 to 512 of SEQ ID NO:448; or amino acids 1 to 529 of SEQ ID NO:450.

[0416] Item 141 The transgenic plant of item 137, further defined as a species selected from the group consisting of maize, wheat, rye, oat, triticale, rice, barley, soybean, peanut, cotton, rapeseed, canola, manihot, pepper, sunflower, tagetes, potato, tobacco, eggplant, tomato, Vicia species, pea, alfalfa, coffee, cacao, tea, Salix species, oil palm, coconut, perennial grasses, and a forage crop plant.

[0417] Item 142 A seed which is true breeding for a transgene comprising, in operative association,
[0418] a) an isolated polynucleotide encoding a promoter;
[0419] b) an isolated polynucleotide encoding a chloroplast transit peptide; and
[0420] c) an isolated polynucleotide encoding a full-length squalene epoxidase polypeptide;
   wherein a transgenic plant grown from said seed demonstrates increased yield as compared to a wild type plant of the same variety which does not comprise the expression cassette.

[0421] Item 143 The seed of item 142, wherein the squalene epoxidase polypeptide comprises a domain comprising a pair of FAD-dependent enzyme motifs, wherein:
[0422] a) one member of the pair has a sequence selected from the group consisting of amino acids 55 to 66 of SEQ ID NO:446; amino acids 79 to 90 of SEQ ID NO:448; and amino acids 98 to 109 of SEQ ID NO:450; and
[0423] b) the other member of the pair has a sequence selected from the group consisting of amino acids 334 to 350 of SEQ ID NO:446; amino acids 331 to 347 of SEQ ID NO:448; and amino acids 347 to 363 of SEQ ID NO:450.

[0424] Item 144 The seed of item 142, wherein the squalene epoxidase polypeptide comprises a domain selected from the group consisting of amino acids 20 to 488 of SEQ ID NO:446; amino acids 44 to 483 of SEQ ID NO:448; and amino acids 63 to 500 of SEQ ID NO:450.

[0425] Item 145 The seed of item 142, wherein the squalene epoxidase polypeptide amino acids 1 to 496 of SEQ ID NO:446; amino acids 1 to 512 of SEQ ID NO:448; or amino acids 1 to 529 of SEQ ID NO:450.

[0426] Item 146 The seed of item 142, further defined as a species selected from the group consisting of maize, wheat, rye, oat, triticale, rice, barley, soybean, peanut, cotton, rapeseed, canola, manihot, pepper, sunflower, tagetes, potato, tobacco, eggplant, tomato, Vicia species, pea, alfalfa, coffee, cacao, tea, Salix species, oil palm, coconut, perennial grasses, and a forage crop plant.

[0427] Item 147 A method of producing a transgenic plant having enhanced yield as compared to a wild type plant of the same variety, the method comprising the steps of:

a) transforming a plant cell with an expression vector comprising, in operative association,
[0428] i) an isolated polynucleotide encoding a promoter;
[0429] ii) an isolated polynucleotide encoding a chloroplast transit peptide; and
[0430] iii) an isolated polynucleotide encoding a full-length squalene epoxidase polypeptide;
   b) regenerating transgenic plants from the transformed plant cell; and
   c) selecting higher-yielding plants from the regenerated transgenic plants.

[0431] Item 148 An isolated polynucleotide having a sequence selected from the group consisting of SEQ ID NO:417; SEQ ID NO:419; SEQ ID NO:421; SEQ ID NO:423; SEQ ID NO:425; SEQ ID NO:427; SEQ ID NO:429; SEQ ID NO:431; SEQ ID NO:435; SEQ ID NO:437; SEQ ID NO:439; SEQ ID NO:447; and SEQ ID NO:449.

[0432] Item 149 An isolated polynucleotide encoding a polypeptide having an amino acid sequence selected from the group consisting of SEQ ID NO:418; SEQ ID NO:420; SEQ ID NO:422; SEQ ID NO:424; SEQ ID NO:426; SEQ ID NO:428; SEQ ID NO:430; SEQ ID NO:432; SEQ ID NO:436; SEQ ID NO:438; SEQ ID NO:440; SEQ ID NO:448; and SEQ ID NO:450.

[0433] The invention is further illustrated by the following examples, which are not to be construed in any way as imposing limitations upon the scope thereof.

### Example 1

### Characterization of cDNAs

[0434] cDNAs were isolated from proprietary libraries of the respective plant species using known methods. Sequences were processed and annotated using bioinformatics analyses. The degrees of amino acid identity and similarity of the isolated sequences to the respective closest known public sequences are indicated in Tables 2A through 11A, Tables 2B through 19B, Tables 2C through 16C, Tables 2D through 24D and Tables 2E through 4E (Pairwise Comparison was used: gap penalty: 10; gap extension penalty: 0.1; score matrix: blosum62).

TABLE 2A
Comparison of GM47143343 (SEQ ID NO: 2) to known
mitogen activated protein kinases

| Public Database | | |
|---|---|---|
| Accession # | Species | Sequence Identity (%) |
| AAD32204 | Prunus armeniaca | 88.60% |
| NP_179409 | A. thaliana | 85.90% |
| BAA04870 | A. thaliana | 85.60% |
| CAN70944 | Vitis vinifera | 82.90% |
| ABO84371 | M. truncatula | 82.90% |

TABLE 3A
Comparison of EST431 (SEQ ID NO: 4) to known mitogen
activated protein kinases

| Public Database Accession # | Species | Sequence Identity (%) |
|---|---|---|
| CAN75543 | V. vinifera | 78.20% |
| NP_001065156 | O. sativa | 77.80% |
| AAR11450 | Z. mays | 77.10% |
| ABB69023 | B. napus | 76.60% |
| AAN65180 | Petroselinum | 76.40% |
| | crispum | |

TABLE 4A
Comparison of EST253 (SEQ ID NO: 6) to known
mitogen activated protein kinase

| Public Database | | |
|---|---|---|
| Accession # | Species | Sequence Identity (%) |
| CAH05024 | Papaver rhoeas | 67.40% |
| Q40517 | Nicotiana tabacum | 67.00% |
| CAN70091 | V. vinifera | 66.80% |
| ABA00652 | Gossypium hirsutum | 66.50% |
| AAF73257 | Pisum sativum | 66.20% |

TABLE 5A
Comparison of EST272 (SEQ ID NO: 30) to known
mitogen activated protein kinase

| Public Database Accession # | Species | Sequence Identity (%) |
|---|---|---|
| NP_001065156 | O. sativa | 69.90% |
| BAB93532 | S. tuberosum | 68.80% |
| Q40353 | M. sativa | 67.70% |
| BAB93531 | S. tuberosum | 66.70% |
| Q06060 | Pisum sativum | 65.80% |

TABLE 6A
Comparison of GM50305602 (SEQ ID NO: 40) to known
calcium dependent protein kinases

| Public Database Accession # | Species | Sequence Identity (%) |
|---|---|---|
| NP_564066 | A. thaliana | 60.90% |
| AAO42812 | A. thaliana | 60.70% |
| BAE98496 | A. thaliana | 59.70% |
| NP_177612 | A. thaliana | 58.00% |
| AAA99794 | A. thaliana | 56.80% |

TABLE 7A
Comparison of EST500 (SEQ ID NO: 42) to known
calcium dependent protein kinases

| Public Database | | |
|---|---|---|
| Accession # | Species | Sequence Identity (%) |
| AAB70706 | Tortula ruralis | 90.00% |
| BAA13232 | Z. mays | 64.80% |
| CAN78387 | V. vinifera | 64.70% |
| AAL68972 | Cucurbita maxima | 64.60% |
| EAY87105 | O. sativa | 64.40% |

TABLE 8A
Comparison of EST401 (SEQ ID NO: 44) to known
calcium dependent protein kinases

| Public Database | | Sequence |
|---|---|---|
| Accession # | Species | Identity (%) |
| AAL30819 | N. tabacum | 64.80% |
| CAN69589 | V. vinifera | 64.30% |
| NP_179379 | A. thaliana | 64.00% |
| AAX81331 | N. tabacum | 64.00% |
| AAX14494 | M. truncatula | 63.70% |

TABLE 9A
Comparison of EST591 (SEQ ID NO: 62) to known
calcium-dependent protein kinases

| Public Database Accession # | Species | Sequence Identity (%) |
|---|---|---|
| NP_001044575 | O. sativa | 61.90% |
| CAN62888 | V. vinifera | 60.90% |
| BAA13440 | Ipomoea batatas | 59.30% |
| CAA65500 | Medicago sativa | 57.50% |
| ABD98803 | T. aestivum | 57.30% |

TABLE 10A
Comparison of BN42110642 (SEQ ID NO: 74) to known
cyclin dependent protein kinases

| Public Database Accession # | Species | Sequence Identity (%) |
|---|---|---|
| NP_190576 | A. thaliana | 74.70% |
| NP_201527 | A. thaliana | 61.30% |
| CAN59802 | V. vinifera | 50.90% |
| BAE80325 | Camellia sinensis | 50.30% |
| AAO72990 | Populus alba | 49.70% |

TABLE 11A
Comparison of EST336 (SEQ ID NO: 82) to known
serine/threonine-specific protein kinases

| Public Database | | |
|---|---|---|
| Accession # | Species | Sequence Identity (%) |
| CAA19877 | A. thaliana | 79.70% |
| NP_567945 | A. thaliana | 79.30% |
| CAN62745 | V. vinifera | 79.10% |
| EAZ21035 | O. sativa | 76.80% |
| ABA40436 | Solanum tuberosum | 76.00% |

[0435] The full-length DNA sequence of the GM47143343 (SEQ ID NO: 2), EST431 (SEQ ID NO:4), EST253 (SEQ ID NO:6), and EST272 (SEQ ID NO:30) were blasted against proprietary databases of canola, soybean, rice, maize, linseed, sunflower, and wheat cDNAs at an e value of e-10 (Altschul et al., 1997, Nucleic Acids Res. 25: 3389-3402). All the contig hits were analyzed for the putative full length sequences, and the longest clones representing the putative full length contigs were fully sequenced. One homolog from wheat, one homolog from corn, four homologs from soybean, four homologs from linseed, four homologs from canola, and one homolog from sunflower were identified. The degree of amino acid identity of these sequences to the closest known public sequences is indicated in Tables 12A through 26A (Pairwise Comparison was used: gap penalty: 10; gap extension penalty: 0.1; score matrix: blosum62).

TABLE 12A
Comparison of TA54298452 (SEQ ID NO: 8) to known
mitogen activated protein kinases

| Public Database Accession # | Species | Sequence Identity (%) |
|---|---|---|
| CAJ85945 | Festuca | 95.10% |
| | arundinacea | |
| CAG23921 | F. arundinacea | 94.60% |
| CAD54741 | O. sativa | 94.00% |
| ABH01191 | O. sativa | 93.80% |
| CAB61889 | O. sativa | 93.50% |

TABLE 13A
Comparison of GM59742369 (SEQ ID NO: 10) to known
mitogen activated protein kinases

| Public Database Accession # | Species | Sequence Identity (%) |
|---|---|---|
| AAF73257 | P. sativum | 93.80% |
| ABA00652 | G. hirsutum | 88.20% |
| Q40517 | N. tabacum | 87.90% |
| CAN70091 | V. vinifera | 87.90% |
| CAH05024 | Papaver rhoeas | 85.50% |

TABLE 14A
Comparison of LU61585372 (SEQ ID NO: 12) to known
mitogen activated protein kinases

| Public Database Accession # | Species | Sequence Identity (%) |
|---|---|---|
| CAN70091 | V. vinifera | 87.50% |
| ABA00652 | G. hirsutum | 87.20% |
| Q40517 | N. tabacum | 86.70% |
| CAH05024 | P. rhoeas | 84.60% |
| AAF73257 | P. sativum | 84.50% |

TABLE 15A
Comparison of BN44703759 (SEQ ID NO: 14) to known
mitogen activated protein kinases

| Public Database | | |
|---|---|---|
| Accession # | Species | Sequence Identity (%) |
| NP_565989 | A. thaliana | 80.10% |
| ABG54347 | synthetic construct | 77.50% |
| ABF69963 | Musa acuminata | 67.70% |
| NP_001043642 | O. sativa | 66.60% |
| NP_001056342 | O. sativa | 64.30% |

TABLE 16A
Comparison of GM59703946 (SEQ ID NO: 16) to known
mitogen activated protein kinases

| Public Database | | |
|---|---|---|
| Accession # | Species | Sequence Identity (%) |
| CAO71082 | V. vinifera | 88.10% |
| AAL32607 | A. thaliana | 80.70% |
| NP_197402 | A. thaliana | 80.70% |
| NP_197402 | A. thaliana | 80.70% |
| ABG54343 | synthetic | 77.80% |
| | construct | |

TABLE 17A
Comparison of GM59589775 (SEQ ID NO: 18) to known
mitogen activated protein kinases

| Public Database | | |
|---|---|---|
| Accession # | Species | Sequence Identity (%) |
| Q40353 | Medicago sativa | 91.20% |
| CAN75543 | V. vinifera | 88.00% |
| AAN65180 | Petroselinum | 87.70% |
| | crispum | |
| BAE46985 | N. tabacum | 84.80% |
| BAA04867 | A. thaliana | 83.60% |

TABLE 18A
Comparison of LU61696985 (SEQ ID NO: 20) to known
mitogen activated protein kinases

| Public Database | | |
|---|---|---|
| Accession # | Species | Sequence Identity (%) |
| AAZ57337 | Cucumis sativus | 86.20% |
| ABM67698 | C. sinensis | 85.70% |
| AAV34677 | B. napus | 83.60% |
| ABJ89813 | Nicotiana attenuata | 83.30% |
| BAE44363 | S. tuberosum | 83.30% |

TABLE 19A
Comparison of ZM62001130 (SEQ ID NO: 22) to known
mitogen activated protein kinases

| Public Database | | |
|---|---|---|
| Accession # | Species | Sequence Identity (%) |
| BAA74733 | Z. mays | 91.20% |
| AAW65993 | Saccharum | 87.40% |
| | officinarum | |
| AAK01710 | O. sativa | 83.70% |
| CAA56314 | A. sativa | 83.70% |
| ABH01189 | O. sativa | 83.40% |

TABLE 20A
Comparison of HA66796355 (SEQ ID NO: 24) to known
mitogen activated protein kinases

| Public Database | | |
|---|---|---|
| Accession # | Species | Sequence Identity (%) |
| ABB16418 | N. tabacum | 92.40% |
| Q40532 | N. tabacum | 92.10% |
| ABB16417 | N. tabacum | 90.90% |
| AAQ14867 | G. max | 90.70% |
| AAP20420 | L. esculentum | 90.20% |

TABLE 21A
Comparison of LU61684898 (SEQ ID NO: 26) to known
mitogen activated protein kinases

| Public Database | | |
|---|---|---|
| Accession # | Species | Sequence Identity (%) |
| AAQ14867 | G. max | 87.70% |
| ABB16418 | N. tabacum | 86.80% |
| Q06060 | P. sativum | 86.70% |
| Q40532 | N. tabacum | 86.30% |
| ABE83899 | M. truncatula | 86.30% |

TABLE 22A
Comparison of LU61597381 (SEQ ID NO: 28) to known
mitogen activated protein kinases

| Public Database | | |
|---|---|---|
| Accession # | Species | Sequence Identity (%) |
| AAN65180 | P. crispum | 82.40% |
| CAN75543 | V. vinifera | 80.10% |
| BAE46985 | N. tabacum | 78.80% |
| Q40353 | M. sativa | 78.50% |
| NP_001065156 | O. sativa | 78.50% |

TABLE 23A
Comparison of BN42920374 (SEQ ID NO: 32) to known
mitogen activated protein kinases

| Public Database | | |
|---|---|---|
| Accession # | Species | Sequence Identity (%) |
| NP_179409 | A. thaliana | 96.50% |
| BAA04870 | A. thaliana | 95.40% |
| ABG54334 | synthetic | 91.50% |
| AAD32204 | P. armeniaca | 85.90% |
| Q40517 | N. tabacum | 81.50% |

TABLE 24A
Comparison of BN45700248 (SEQ ID NO: 34) to known
mitogen activated protein kinases

| Public Database | | |
|---|---|---|
| Accession # | Species | Sequence Identity (%) |
| NP_182131 | A. thaliana | 96.20% |
| ABG54339 | synthetic | 91.10% |
| AAC62906 | A. thaliana | 88.20% |
| AAN65180 | P. crispum | 79.70% |
| CAN75543 | Vitis vinifera | 79.20% |

TABLE 25A
Comparison of BN47678601 (SEQ ID NO: 36) to known
mitogen activated protein kinases

| Public Database | | |
|---|---|---|
| Accession # | Species | Sequence Identity (%) |
| ABB69023 | B. napus | 98.70% |
| BAA04867 | A. thaliana | 93.60% |
| ABG54331 | synthetic | 88.90% |
| NP_192046 | A. thaliana | 88.30% |
| ABG54338 | synthetic | 82.50% |

TABLE 26A
Comparison of GMsj02a06 (SEQ ID NO: 38) to known
mitogen activated protein kinases

| Public Database | | |
|---|---|---|
| Accession # | Species | Sequence Identity (%) |
| AAQ14867 | G. max | 91.60% |
| Q07176 | M. sativa | 88.20% |
| ABE83899 | M. truncatula | 88.20% |
| Q06060 | P. sativum | 87.10% |
| AAP20420 | L. esculentum | 84.30% |

[0436] The full-length DNA sequences of the GM50305602 (SEQ ID NO: 40), EST500 (SEQ ID NO:42), and EST401 (SEQ ID NO:44) were blasted against proprietary databases of canola, soybean, rice, maize, linseed, sunflower, and wheat cDNAs at an e value of e⁻¹⁰ (Altschul et al., 1997, Nucleic Acids Res. 25: 3389-3402). All the contig hits were analyzed for the putative full length sequences, and the longest clones representing the putative full length contigs were fully sequenced. Eight homologs from canola, two homologs from soybean, two homologs from corn, and one homolog from wheat were identified. The degree of amino acid identity of these sequences to the closest known public sequences is indicated in Tables 27A through 39A (Pairwise Comparison was used: gap penalty: 10; gap extension penalty: 0.1; score matrix: blosum62).

TABLE 27A
Comparison of BN51391539 (SEQ ID NO: 46) to known
calcium dependent protein kinases

| Public Database | | |
|---|---|---|
| Accession # | Species | Sequence Identity (%) |
| AAL38596 | A. thaliana | 91.00% |
| CAN61364 | V. vinifera | 72.90% |
| ABE79749 | M. truncatula | 72.70% |
| EAZ12734 | O. sativa | 72.30% |
| CAF18446 | T. aestivum | 70.90% |

TABLE 28A
Comparison of GM59762784 (SEQ ID NO: 48) to known
calcium dependent protein kinases

| Public Database | | |
|---|---|---|
| Accession # | Species | Sequence Identity (%) |
| CAA65500 | M. sativa | 79.10% |
| ABE72958 | M. truncatula | 78.80% |
| AAB80693 | G. max | 77.70% |
| AAP03014 | G. max | 77.10% |
| AAD28192 | S. tuberosum | 76.50% |

TABLE 29A
Comparison of BN44099508 (SEQ ID NO: 50) to known
calcium dependent protein kinases

| Public Database | | |
|---|---|---|
| Accession # | Species | Sequence Identity (%) |
| NP_181647 | A. thaliana | 93.80% |
| NP_191235 | A. thaliana | 90.50% |
| ABD33022 | M. truncatula | 78.90% |
| BAC16472 | O. sativa | 74.40% |
| NP_001050179 | O. sativa | 70.80% |

TABLE 30A
Comparison of BN45789913 (SEQ ID NO: 52) to known
calcium dependent protein kinases

| Public Database Accession # | Species | Sequence Identity (%) |
|---|---|---|
| NP_197831 | A. thaliana | 91.90% |
| NP_190506 | A. thaliana | 85.50% |
| AAD28759 | A. thaliana | 70.70% |
| AAM91611 | A. thaliana | 70.50% |
| AAL30818 | N. tabacum | 68.00% |

TABLE 31A
Comparison of BN47959187 (SEQ ID NO: 54) to known calcium
dependent protein kinases

| Public Database Accession # | Species | Sequence Identity (%) |
|---|---|---|
| NP_179379 | A. thaliana | 89.80% |
| NP_195331 | A. thaliana | 74.90% |
| AAX14494 | M. truncatula | 74.50% |
| AAL30819 | N. tabacum | 73.90% |
| CAA18501 | A. thaliana | 73.60% |

TABLE 32A
Comparison of BN51418316 (SEQ ID NO: 56) to known
calcium dependent protein kinases

| Public Database Accession # | Species | Sequence Identity (%) |
|---|---|---|
| NP_564066 | A. thaliana | 90.30% |
| AAO42812 | A. thaliana | 90.10% |
| BAA04829 | A. thaliana | 84.50% |
| NP_177612 | A. thaliana | 81.40% |
| EAZ04388 | O. sativa | 65.80% |

TABLE 33A
Comparison of GM59691587 (SEQ ID NO: 58) to known calcium
dependent protein kinases

| Public Database | | |
|---|---|---|
| Accession # | Species | Sequence Identity (%) |
| AAC49405 | Vigna radiata | 87.10% |
| AAL68972 | Cucurbita maxima | 86.60% |
| BAF57913 | S. tuberosum | 85.60% |
| BAF57914 | S. tuberosum | 85.50% |
| CAN78387 | V. vinifera | 85.20% |

TABLE 34A
Comparison of ZM62219224 (SEQ ID NO: 60) to known
calcium dependent protein kinases

| Public Database Accession # | Species | Sequence Identity (%) |
|---|---|---|
| CAA57156 | O. sativa | 86.60% |
| BAC19839 | O. sativa | 86.40% |
| AAC05270 | O. sativa | 85.70% |
| EAY88372 | O. sativa | 85.10% |
| AAN17388 | O. sativa | 82.80% |

TABLE 35A
Comparison of BN51345938 (SEQ ID NO: 64) to known
calcium dependent protein kinases

| Public Database Accession # | Species | Sequence Identity (%) |
|---|---|---|
| AAZ32753 | B. napus | 97.10% |
| AAZ32752 | B. rapa | 96.90% |
| NP_565411 | A. thaliana | 86.00% |
| AAZ32751 | B. oleracea | 85.90% |
| NP_195257 | A. thaliana | 82.00% |

TABLE 36A
Comparison of BN51456960 (SEQ ID NO: 66) to known
calcium dependent protein kinases

| Public Database Accession # | Species | Sequence Identity (%) |
|---|---|---|
| NP_568281 | A. thaliana | 94.20% |
| NP_197446 | A. thaliana | 89.70% |
| BAE99123 | A. thaliana | 82.70% |
| CAG27839 | Nicotiana | 80.80% |
| | plumbaginifolia | |
| AAP72282 | Cicer arietinum | 77.60% |

TABLE 37A
Comparison of BN43562070 (SEQ ID NO: 68) to known
calcium dependent protein kinases

| Public Database Accession # | Species | Sequence Identity (%) |
|---|---|---|
| NP_196779 | A. thaliana | 95.70% |
| AAL59948 | A. thaliana | 95.50% |
| NP_197437 | A. thaliana | 93.00% |
| ABE77685 | M. truncatula | 81.10% |
| CAN62888 | V. vinifera | 79.10% |

TABLE 38A
Comparison of TA60004809 (SEQ ID NO: 70) to known
calcium dependent protein kinases

| Public Database Accession # | Species | Sequence Identity (%) |
|---|---|---|
| ABK63287 | T. aestivum | 96.50% |
| CAA57156 | O. sativa | 82.70% |
| EAY88372 | O. sativa | 81.20% |
| AAN17388 | O. sativa | 78.50% |
| NP_001048842 | O. sativa | 61.10% |

TABLE 39A
Comparison of ZM62079719 (SEQ ID NO: 72) to known
calcium dependent protein kinases

| Public Database Accession # | Species | Sequence Identity (%) |
|---|---|---|
| BAA12715 | Z. mays | 97.20% |
| NP_001059775 | O. sativa | 92.30% |
| CAA57157 | O. sativa | 92.30% |
| ABC59619 | T. aestivum | 90.10% |
| ABD98803 | T. aestivum | 89.90% |

[0437] The full-length DNA sequence of the BN42110642 (SEQ ID NO:74) was blasted against proprietary databases of canola, soybean, rice, maize, linseed, sunflower, and wheat cDNAs at an e value of e⁻¹⁰ (Altschul et al., 1997, Nucleic Acids Res. 25: 3389-3402). All the contig hits were analyzed for the putative full length sequences, and the longest clones representing the putative full length contigs were fully sequenced. Two homologs from soybean and one homolog from corn were identified. The degree of amino acid identity of these sequences to the closest known public sequences is indicated in Tables 40A through 42A (Pairwise Comparison was used: gap penalty: 10; gap extension penalty: 0.1; score matrix: blosum62).

TABLE 40A
Comparison of GM59794180 (SEQ ID NO: 76) to known
cyclin dependent protein kinases

| Public Database Accession # | Species | Sequence Identity (%) |
|---|---|---|
| ABP03744 | M. truncatula | 73.90% |
| NP_177178 | A. thaliana | 60.90% |
| CAA58285 | A. thaliana | 60.30% |
| S51650 | A. thaliana | 58.10% |
| AAL47479 | Helianthus | 56.30% |
| | tuberosus | |

TABLE 41A
Comparison of GMsp52b07 (SEQ ID NO: 78) to known
cyclin dependent protein kinases

| Public Database Accession # | Species | Sequence Identity (%) |
|---|---|---|
| AAS13371 | G. max | 90.80% |
| CAB40540 | M. sativa | 72.80% |
| CAA61334 | M. sativa | 72.20% |
| BAA33153 | P. sativum | 70.80% |
| BAE93057 | N. tabacum | 58.70% |

TABLE 42A
Comparison of ZM57272608 (SEQ ID NO: 80) to known
cyclin dependent protein kinases

| Public Database Accession # | Species | Sequence Identity (%) |
|---|---|---|
| EAZ04741 | O. sativa | 64.60% |
| NP_001060304 | O. sativa | 64.60% |
| AAV28532 | S. officinarum | 47.40% |
| AAV28533 | S. officinarum | 47.00% |
| ABB36799 | Z. mays | 46.70% |

[0438] The full-length DNA sequence of the EST336 (SEQ ID NO: 82) was blasted against proprietary databases of canola, soybean, rice, maize, linseed, sunflower, and wheat cDNAs at an e value of e⁻¹⁰ (Altschul et al., 1997, Nucleic Acids Res. 25: 3389-3402). All the contig hits were analyzed for the putative full length sequences, and the longest clones representing the putative full length contigs were fully sequenced. Two homologs from canola, two homologs from maize, two homologs from linseed, and three homologs from soybean were identified. The degree of amino acid identity of these sequences to the closest known public sequences is indicated in Tables 43A through 51A (Pairwise Comparison was used: gap penalty: 10; gap extension penalty: 0.1; score matrix: blosum62).

TABLE 43A
Comparison of BN43012559 (SEQ ID NO: 84) to known
serine/threonine-specific protein kinases

| Public Database Accession # | Species | Sequence Identity (%) |
|---|---|---|
| NP_196476 | A. thaliana | 90.20% |
| CAA78106 | A. thaliana | 89.60% |
| AAM65503 | A. thaliana | 88.00% |
| NP_201170 | A. thaliana | 87.50% |
| BAE99712 | A. thaliana | 87.30% |

TABLE 44A
Comparison of BN44705066 (SEQ ID NO: 86) to known
serine/threonine-specific protein kinases

| Public Database Accession # | Species | Sequence Identity (%) |
|---|---|---|
| AAA33004 | B. napus | 94.70% |
| AAA33003 | B. napus | 94.70% |
| NP_172563 | A. thaliana | 92.80% |
| AAM67112 | A. thaliana | 90.30% |
| NP_176290 | A. thaliana | 71.90% |

TABLE 45A
Comparison of GM50962576 (SEQ ID NO: 88) to known
serine/threonine-specific protein kinases

| Public Database Accession # | Species | Sequence Identity (%) |
|---|---|---|
| CAN62745 | V. vinifera | 89.80% |
| NP_567945 | A. thaliana | 89.30% |
| CAA19877 | A. thaliana | 87.90% |
| EAY83693 | O. sativa | 81.30% |
| NP_001050653 | O. sativa | 58.30% |

TABLE 46A
Comparison of GMsk93h09 (SEQ ID NO: 90) to known
serine/threonine-specific protein kinases

| Public Database Accession # | Species | Sequence Identity (%) |
|---|---|---|
| CAN62745 | V. vinifera | 83.70% |
| ABA40436 | S. tuberosum | 82.50% |
| AAF27340 | Vicia faba | 82.50% |
| NP_201489 | A. thaliana | 81.50% |
| NP_001050653 | O. sativa | 55.40% |

TABLE 47A
Comparison of GMso31a02 (SEQ ID NO: 92) to known
serine/threonine-specific protein kinases

| Public Database Accession # | Species | Sequence Identity (%) |
|---|---|---|
| Q75V63 | O. sativa | 78.90% |
| NP_001065412 | O. sativa | 78.90% |
| AAA34017 | G. max | 78.50% |
| AAA33979 | G. max | 77.00% |
| CAN62023 | V. vinifera | 75.10% |

TABLE 48A
Comparison of LU61649369 (SEQ ID NO: 94) to known
serine/threonine-specific protein kinases

| Public Database Accession # | Species | Sequence Identity (%) |
|---|---|---|
| NP_201489 | A. thaliana | 83.10% |
| CAN62745 | V. vinifera | 82.10% |
| NP_567945 | A. thaliana | 81.60% |
| CAA19877 | A. thaliana | 80.70% |
| NP_001050653 | O. sativa | 55.70% |

TABLE 49A
Comparison of LU61704197 (SEQ ID NO: 96) to known
serine/threonine-specific protein kinases

| Public Database Accession # | Species | Sequence Identity (%) |
|---|---|---|
| CAN78793 | V. vinifera | 84.90% |
| ABG81507 | C. sinensis | 83.90% |
| AAL89456 | N. tabacum | 83.20% |
| CAE54588 | Fagus sylvatica | 83.00% |
| AAV41842 | M. truncatula | 82.20% |

TABLE 50A
Comparison of ZM57508275 (SEQ ID NO: 98) to known
serine/threonine-specific protein kinases

| Public Database Accession # | Species | Sequence Identity (%) |
|---|---|---|
| EAY91961 | O. sativa | 94.60% |
| CAN62745 | Vitis vinifera | 82.60% |
| CAA19877 | A. thaliana | 81.20% |
| NP_001051371 | O. sativa | 74.70% |
| NP_001050653 | O. sativa | 58.60% |

TABLE 51A
Comparison of ZM59288476 (SEQ ID NO: 100) to known
serine/threonine-specific protein kinases

| Public Database Accession # | Species | Sequence Identity (%) |
|---|---|---|
| ABD72268 | O. sativa | 91.20% |
| NP_001052827 | O. sativa | 74.90% |
| AAU43772 | Z. mays | 73.50% |
| NP_001044930 | O. sativa | 64.40% |
| NP_001047099 | O. sativa | 54.10% |

TABLE 2B
Comparison of BN42194524 (SEQ ID NO: 102) to known phospholipid
hydroperoxide glutathione peroxidases

| Public Database Accession # | Species | Sequence Identity (%) |
|---|---|---|
| AAP59427 | Lycopersicon | 76.90% |
| | esculentum | |
| CAN60579 | V. vinifera | 76.90% |
| AAL40914 | Momordica | 76.30% |
| | charantia | |
| CAD31839 | Cicer arietinum | 71.60% |
| NP_001053524 | O. sativa | 71.20% |

[0439] The full-length DNA sequence of the BN42194524 (SEQ ID NO: 102) was blasted against proprietary databases of canola, soybean, rice, maize, linseed, sunflower, and wheat cDNAs at an e value of e⁻¹⁰ (Altschul et al., 1997, Nucleic Acids Res. 25: 3389-3402). All the contig hits were analyzed for the putative full length sequences, and the longest clones representing the putative full length contigs were fully sequenced. Four homologs from corn, three homologs from canola, seven homologs from soybean, one homolog from linseed, and two homologs from rice were identified. The degree of amino acid identity of these sequences to the closest known public sequences is indicated in Tables 19B and 20B (Pairwise Comparison was used: gap penalty: 10; gap extension penalty: 0.1; score matrix: blosum62).

TABLE 3B
Comparison of ZM68498581 (SEQ ID NO: 104) to known phospholipid
hydroperoxide glutathione peroxidases

| Public Database Accession # | Species | Sequence Identity (%) |
|---|---|---|
| AAT42154 | Z. mays | 93.70% |
| AAT42166 | Sorghum bicolor | 92.60% |
| AAS47590 | S. italica | 91.40% |
| AAM88847 | Z. mays | 88.60% |
| NP_001053524 | O. sativa | 88.00% |

TABLE 4B
Comparison of BN42062606 (SEQ ID NO: 106) to known phospholipid
hydroperoxide glutathione peroxidases

| Public Database Accession # | Species | Sequence Identity (%) |
|---|---|---|
| NP_180080 | A. thaliana | 87.00% |
| S71250 | A. thaliana | 84.90% |
| NP_194915 | A. thaliana | 80.10% |
| Q9SZ54 | A. thaliana | 77.50% |
| AAM12502 | B. napus | 73.20% |

TABLE 5B
Comparison of BN42261838 (SEQ ID NO: 108) to known phospholipid
hydroperoxide glutathione peroxidases

| Public Database | | |
|---|---|---|
| Accession # | Species | Sequence Identity (%) |
| BAA24226 | A. thaliana | 94.70% |
| AAQ03092 | Malus × domestica | 88.80% |
| AAT42166 | S. bicolor | 87.00% |
| AAT42154 | Z. mays | 87.00% |
| AAS47590 | Setaria italica | 86.40% |

TABLE 6B
Comparison of BN43722096 (SEQ ID NO: 110) to known phospholipid
hydroperoxide glutathione peroxidases

| Public Database Accession # | Species | Sequence Identity (%) |
|---|---|---|
| NP_191867 | A. thaliana | 83.90% |
| NP_566128 | A. thaliana | 81.20% |
| A84924 | A. thaliana | 77.30% |
| BAC55016 | H. vulgare | 66.50% |
| AAT42166 | S. bicolor | 65.90% |

TABLE 7B
Comparison of GM50585691 (SEQ ID NO: 112) to known phospholipid
hydroperoxide glutathione peroxidases

| Public Database | | |
|---|---|---|
| Accession # | Species | Sequence Identity (%) |
| Q06652 | C. sinensis | 82.00% |
| CAE46896 | C. sinensis | 81.40% |
| AAQ03092 | Malus × domestica | 81.00% |
| BAA24226 | A. thaliana | 79.90% |
| CAJ43709 | Plantago major | 79.80% |

TABLE 8B
Comparison of GMsa56c07 (SEQ ID NO: 114) to known phospholipid
hydroperoxide glutathione peroxidases

| Public Database | | |
|---|---|---|
| Accession # | Species | Sequence Identity (%) |
| Q06652 | Citrus sinensis | 85.00% |
| CAE46896 | C. sinensis | 84.40% |
| AAQ03092 | Malus × domestica | 82.70% |
| NP_001053524 | O. sativa | 82.10% |
| CAJ43709 | P. major | 81.50% |

TABLE 9B
Comparison of GMsb20d04 (SEQ ID NO: 116) to known phospholipid
hydroperoxide glutathione peroxidases

| Public Database | | |
|---|---|---|
| Accession # | Species | Sequence Identity (%) |
| AAQ03092 | Malus × domestica | 87.50% |
| Q06652 | C. sinensis | 87.50% |
| CAE46896 | C. sinensis | 86.90% |
| AAT42166 | S. bicolor | 85.10% |
| AAS47590 | S. italica | 85.10% |

TABLE 10B
Comparison of GMsg04a02 (SEQ ID NO: 118) to known
phospholipid hydroperoxide glutathione peroxidases

| Public Database | | |
|---|---|---|
| Accession # | Species | Sequence Identity (%) |
| CAD31839 | C. arietinum | 88.00% |
| AAP81673 | Lotus corniculatus | 85.60% |
| AAL40914 | Momordica charantia | 83.80% |
| CAN60579 | V. vinifera | 83.20% |
| AAT42166 | S. bicolor | 76.20% |

TABLE 11B
Comparison of GMsp36c10 (SEQ ID NO: 120) to known
phospholipid hydroperoxide glutathione peroxidases

| Public Database | | |
|---|---|---|
| Accession # | Species | Sequence Identity (%) |
| O24296 | P. sativum | 80.10% |
| ABE93916 | M. truncatula | 79.20% |
| CAL59721 | M. sativa | 79.20% |
| NP_194915 | A. thaliana | 70.80% |
| AAC78466 | Zantedeschia | 69.30% |
| | aethiopica | |

TABLE 12B
Comparison of GMsp82f11 (SEQ ID NO: 122) to known
phospholipid hydroperoxide glutathione peroxidases

| Public Database | | |
|---|---|---|
| Accession # | Species | Sequence Identity (%) |
| NP_566128 | A. thaliana | 72.90% |
| NP_191867 | A. thaliana | 71.40% |
| AAQ03092 | Malus x domestica | 70.80% |
| AAM88847 | Z. mays | 69.40% |
| A84924 | A. thaliana | 69.00% |

TABLE 13B
Comparison of GMss66f03 (SEQ ID NO: 124) to known
phospholipid hydroperoxide glutathione peroxidases

| Public Database | | |
|---|---|---|
| Accession # | Species | Sequence Identity (%) |
| NP_566128 | A. thaliana | 71.20% |
| NP_191867 | A. thaliana | 69.10% |
| A84924 | A. thaliana | 67.30% |
| CAJ43709 | P. major | 66.50% |
| CAJ00224 | Capsicum chinense | 65.90% |

TABLE 14B
Comparison of LU61748885 (SEQ ID NO: 126) to known
phospholipid hydroperoxide glutathione peroxidases

| Public Database | | Sequence |
|---|---|---|
| Accession # | Species | Identity (%) |
| ABN59534 | Populus trichocarpa x Populus | 75.90% |
| | deltoides | |
| ABE92132 | M. truncatula | 73.80% |
| NP_564813 | A. thaliana | 71.80% |
| AAQ03092 | Malus x domestica | 70.60% |
| Q06652 | C. sinensis | 70.60% |

TABLE 15B
Comparison of OS36582281 (SEQ ID NO: 128) to known
phospholipid hydroperoxide glutathione peroxidases

| Public Database | | |
|---|---|---|
| Accession # | Species | Sequence Identity (%) |
| NP_001050145 | O. sativa | 76.50% |
| NP_566128 | A. thaliana | 72.90% |
| NP_191867 | A. thaliana | 69.10% |
| A84924 | A. thaliana | 68.40% |
| AAT42166 | S. bicolor | 64.70% |

TABLE 16B
Comparison of OS40057356 (SEQ ID NO: 130) to known
phospholipid hydroperoxide glutathione peroxidases

| Public Database | | |
|---|---|---|
| Accession # | Species | Sequence Identity (%) |
| NP_001053524 | O. sativa | 86.70% |
| CAD41644 | O. sativa | 85.30% |
| EAY95121 | O. sativa | 84.80% |
| AAS47590 | S. italica | 82.70% |
| AAT42166 | S. bicolor | 82.30% |

TABLE 17B
Comparison of ZM57588094 (SEQ ID NO: 132) to known
phospholipid hydroperoxide glutathione peroxidases

| Public Database | | |
|---|---|---|
| Accession # | Species | Sequence Identity (%) |
| BAD72440 | O. sativa | 73.50% |
| NP_001057006 | O. sativa | 71.80% |
| EAY99944 | O. sativa | 71.60% |
| CAN70486 | V. vinifera | 68.70% |
| NP_194915 | A. thaliana | 68.50% |

TABLE 18B
Comparison of ZM67281604 (SEQ ID NO: 134) to known
phospholipid hydroperoxide glutathione peroxidases

| Public Database | | |
|---|---|---|
| Accession # | Species | Sequence Identity (%) |
| AAS82602 | Z. mays | 95.50% |
| AAT42166 | S. bicolor | 95.20% |
| AAS47590 | S. italica | 94.00% |
| AAT42154 | Z. mays | 92.90% |
| AAQ64633 | T. monococcum | 92.30% |

TABLE 19B
Comparison of ZM68466470 (SEQ ID NO: 136) to known
phospholipid hydroperoxide glutathione peroxidases

| Public Database | | |
|---|---|---|
| Accession # | Species | Sequence Identity (%) |
| AAP59427 | L. esculentum | 50.30% |
| YP_570594 | Rhodopseudomonas | 49.70% |
| | palustris | |
| ZP_01061463 | Flavobacterium sp. MED217 | 47.50% |
| NP_948965 | Rhodopseudomonas | 47.50% |
| | palustris | |
| YP_578461 | Nitrobacter hamburgensis | 47.00% |

TABLE 2C
Comparison of BN45660154_5 (SEQ ID NO: 138) to known
TCP family transcription factors

| Public Database | | |
|---|---|---|
| Accession # | Species | Sequence Identity (%) |
| NP_189337 | A. thaliana | 79.90% |
| NP_001045247 | O. sativa | 44.00% |
| EAZ14676 | O. sativa | 41.20% |
| EAY77036 | O. sativa | 40.40% |
| NP_198919 | A. thaliana | 40.00% |

TABLE 3C
Comparison of BN45660154_8 (SEQ ID NO: 140) to known
TCP family transcription factors

| Public Database | | |
|---|---|---|
| Accession # | Species | Sequence Identity (%) |
| NP_189337 | A. thaliana | 81.30% |
| NP_001045247 | O. sativa | 44.50% |
| EAZ14676 | O. sativa | 41.40% |
| EAY77036 | O. sativa | 41.20% |
| NP_198919 | A. thaliana | 40.60% |

TABLE 4C
Comparison of ZM58885021 (SEQ ID NO: 142) to known
TCP family transcription factors

| Public Database | | |
|---|---|---|
| Accession # | Species | Sequence Identity (%) |
| EAZ24612 | O. sativa | 83.50% |
| NP_001048115 | O. sativa | 83.30% |
| BAD37305 | O. sativa | 67.80% |
| EAZ36344 | O. sativa | 60.40% |
| EAY87524 | O. sativa | 60.40% |

TABLE 5C
Comparison of BN43100775 (SEQ ID NO: 146) to known
ribosomal protein S6 kinases

| Public Database | | |
|---|---|---|
| Accession # | Species | Sequence Identity (%) |
| BAA07661 | A. thaliana | 84.80% |
| AAM61496 | A. thaliana | 83.50% |
| NP_187484 | A. thaliana | 66.20% |
| NP_001050027 | O. sativa | 65.70% |
| CAA56313 | Avena sativa | 64.50% |

TABLE 6C
Comparison of GM59673822 (SEQ ID NO: 148) to known
ribosomal protein S6 kinases

| Public Database | | |
|---|---|---|
| Accession # | Species | Sequence Identity (%) |
| NP_001050027 | O. sativa | 68.30% |
| BAA07661 | A. thaliana | 68.00% |
| CAB89082 | Asparagus officinalis | 67.60% |
| AAM61496 | A. thaliana | 66.50% |
| CAA56313 | A. sativa | 66.20% |

TABLE 7C
Comparison of AT5G60750 (SEQ ID NO: 158) to known
CAAX amino terminal protease family proteins

| Public Database | | |
|---|---|---|
| Accession # | Species | Sequence Identity (%) |
| NP_568928 | A. thaliana | 100.00% |
| BAB09848 | A. thaliana | 85.90% |
| ABE87113 | M. truncatula | 57.90% |
| EAZ01098 | O. sativa | 51.90% |
| NP_001057716 | O. sativa | 51.90% |

TABLE 8C
Comparison of BN51278543 (SEQ ID NO: 164) to
known DNA binding proteins

| Public Database | | |
|---|---|---|
| Accession # | Species | Sequence Identity (%) |
| AAK25936 | A. thaliana | 87.50% |
| NP_850679 | A. thaliana | 85.80% |
| ABJ97690 | Solanum tuberosum | 77.90% |
| NP_190748 | A. thaliana | 77.20% |
| ABF66654 | Ammopiptanthus | 75.80% |
| | mongolicus | |

TABLE 9C
Comparison of BN4306781 (SEQ ID NO: 174) to
proteins of unknown function

| Public Database | | |
|---|---|---|
| Accession # | Species | Sequence Identity (%) |
| NP_563630 | A. thaliana | 62.20% |
| NP_566063 | A. thaliana | 55.60% |
| AAL24177 | A. thaliana | 55.30% |
| ABB16971 | S. tuberosum | 52.10% |
| NP_192045 | A. thaliana | 48.10% |

TABLE 10C
Comparison of BN48622391 (SEQ ID NO: 176) to
known rev interacting proteins mis3

| Public Database | | |
|---|---|---|
| Accession # | Species | Sequence Identity (%) |
| NP_196459 | A. thaliana | 80.90% |
| AAM64563 | A. thaliana | 80.90% |
| NP_001064737 | O. sativa | 67.50% |
| EAY78750 | O. sativa | 60.50% |
| EAZ16285 | O. sativa | 60.20% |

TABLE 11C
Comparison of ZM57926241 (SEQ ID NO: 206) to
known CCCH type zinc finger proteins

| Public Database | | |
|---|---|---|
| Accession # | Species | Sequence Identity (%) |
| NP_001042276 | O. sativa | 74.90% |
| EAY72862 | O. sativa | 74.70% |
| EAY96854 | O. sativa | 67.20% |
| NP_001054861 | O. sativa | 67.10% |
| EAZ10869 | O. sativa | 57.40% |

TABLE 12C
Comparison of GM49819537 (SEQ ID NO: 182) to
known GRF1 interacting factors

| Public Database | | |
|---|---|---|
| Accession # | Species | Sequence Identity (%) |
| NP_198216 | A. thaliana | 65.20% |
| NP_001051174 | O. sativa | 51.10% |
| ABQ01228 | Z. mays | 50.40% |
| EAZ28484 | O. sativa | 40.80% |
| EAY91764 | O. sativa | 40.20% |

TABLE 13C
Comparison of HA66670700 (SEQ ID NO: 190) to
known eukaryotic translation initiation factor 4A proteins

| Public Database | | Sequence |
|---|---|---|
| Accession # | Species | Identity (%) |
| CAN62124 | V. vinifera | 88.60% |
| P41380 | Nicotiana plumbaginifolia | 88.00% |
| NP_001043673 | O. sativa | 88.00% |
| NP_001050506 | O. sativa | 87.50% |
| ABC55720 | Z. mays | 87.00% |

TABLE 14C
Comparison of HV100766 (SEQ ID NO: 202) to
known amino acid transporters

| Public Database | | |
|---|---|---|
| Accession # | Species | Sequence Identity (%) |
| NP_001060901 | O. sativa | 89.50% |
| CAD89802 | O. sativa | 87.70% |
| NP_198894 | A. thaliana | 76.70% |
| NP_851109 | A. thaliana | 76.50% |
| NP_564217 | A. thaliana | 76.10% |

TABLE 15C
Comparison of EST397 (SEQ ID NO: 204) to
known cyclic nucleotide gated ion channels

| Public Database | | |
|---|---|---|
| Accession # | Species | Sequence Identity (%) |
| NP_194785 | A. thaliana | 52.20% |
| NP_180393 | A. thaliana | 51.80% |
| CAN83465 | V. vinifera | 51.50% |
| Q9S9N5 | A. thaliana | 51.50% |
| NP_173051 | A. thaliana | 51.50% |

TABLE 16C
Comparison of ZM62043790 (SEQ ID NO: 154) to
known TGF beta receptor interacting proteins

| Public Database | | |
|---|---|---|
| Accession # | Species | Sequence Identity (%) |
| NP_001055036 | O. sativa | 89.30% |
| CAN80198 | V. vinifera | 80.10% |
| AAK49947 | Phaseolus | 79.50% |
| | vulgaris | |
| EAY97288 | O. sativa | 78.70% |
| ABO78477 | M. truncatula | 77.90% |

[0440] The full-length DNA sequence of the BN45660154_{—}5 (SEQ ID NO: 138), BN45660154_{—}8 (SEQ ID NO:140), and ZM58885021 (SEQ ID NO:142) were blasted against proprietary databases of canola, soybean, rice, maize, linseed, sunflower, and wheat cDNAs at an e value of e⁻¹⁰ (Altschul et al., 1997, Nucleic Acids Res. 25: 3389-3402). All the contig hits were analyzed for the putative full length sequences, and the longest clones representing the putative full length contigs were fully sequenced. One homologs from canola was identified. The degree of amino acid identity of these sequences to the closest known public sequences is indicated in Table 17C (Pairwise Comparison was used: gap penalty: 10; gap extension penalty: 0.1; score matrix: blosum62).

TABLE 17C
Comparison of BN46929759 (SEQ ID NO: 144) to
known TCP family transcription factors

| Public Database | | |
|---|---|---|
| Accession # | Species | Sequence Identity (%) |
| NP_564973 | A. thaliana | 82.80% |
| EAY87524 | O. sativa | 45.60% |
| EAZ24612 | O. sativa | 42.90% |
| NP_001048115 | O. sativa | 42.80% |
| BAD37305 | O. sativa | 42.60% |

[0441] The full-length DNA sequence of the BN43100775 (SEQ ID NO: 146) and GM59673822 (SEQ ID NO:148) were blasted against proprietary databases of canola, soybean, rice, maize, linseed, sunflower, and wheat cDNAs at an e value of e⁻¹⁰ (Altschul et al., 1997, Nucleic Acids Res. 25: 3389-3402). All the contig hits were analyzed for the putative full length sequences, and the longest clones representing the putative full length contigs were fully sequenced. One homolog from corn was identified. The degree of amino acid identity of these sequences to the closest known public sequences is indicated in Table 18C (Pairwise Comparison was used: gap penalty: 10; gap extension penalty: 0.1; score matrix: blosum62).

TABLE 18C
Comparison of ZM59314493 (SEQ ID NO: 150) to
known ribosomal protein S6 kinases

| Public Database | | |
|---|---|---|
| Accession # | Species | Sequence Identity (%) |
| NP_001050027 | O. sativa | 87.70% |
| CAA56313 | O. sativa | 85.20% |
| EAZ41107 | O. sativa | 75.70% |
| EAZ05158 | O. sativa | 75.70% |
| AAQ93804 | Z. mays | 73.40% |

[0442] The full-length DNA sequence of the AT5G60750 (SEQ ID NO: 158) was blasted against proprietary databases of canola, soybean, rice, maize, linseed, sunflower, and wheat cDNAs at an e value of e⁻¹⁰ (Altschul et al., 1997, Nucleic Acids Res. 25: 3389-3402). All the contig hits were analyzed for the putative full length sequences, and the longest clones representing the putative full length contigs were fully sequenced. One homolog from canola and one homolog from corn were identified. The degree of amino acid identity of these sequences to the closest known public sequences is indicated in Tables 19C and 20C (Pairwise Comparison was used: gap penalty: 10; gap extension penalty: 0.1; score matrix: blosum62).

TABLE 19C
Comparison of BN47819599 (SEQ ID NO: 160) to
known CAAX amino terminal protease family proteins

| Public Database | | |
|---|---|---|
| Accession # | Species | Sequence Identity (%) |
| AAM65055 | A. thaliana | 86.20% |
| NP_563943 | A. thaliana | 83.10% |
| AAF43926 | A. thaliana | 82.00% |
| NP_973823 | A. thaliana | 65.90% |
| NP_001077532 | A. thaliana | 61.40% |

TABLE 20C
Comparison of ZM65102675 (SEQ ID NO: 162) to
known CAAX amino terminal protease family proteins

| Public Database | | |
|---|---|---|
| Accession # | Species | Sequence Identity (%) |
| EAZ01098 | O. sativa | 75.30% |
| NP_001057716 | O. sativa | 75.30% |
| ABE87113 | M. truncatula | 55.90% |
| NP_568928 | A. thaliana | 53.70% |
| BAB09848 | A. thaliana | 52.20% |

[0443] The full-length DNA sequence of the BN51278543 (SEQ ID NO: 164) was blasted against proprietary databases of canola, soybean, rice, maize, linseed, sunflower, and wheat cDNAs at an e value of e⁻¹⁰ (Altschul et al., 1997, Nucleic Acids Res. 25: 3389-3402). All the contig hits were analyzed for the putative full length sequences, and the longest clones representing the putative full length contigs were fully sequenced. Two homologs from soybean and two homologs from corn were identified. The degree of amino acid identity of these sequences to the closest known public sequences is indicated in Tables 21C through 24C (Pairwise Comparison was used: gap penalty: 10; gap extension penalty: 0.1; score matrix: blosum62).

TABLE 21C
Comparison of GM59587627 (SEQ ID NO: 166) to
known DNA binding protein

| Public Database | | |
|---|---|---|
| Accession # | Species | Sequence Identity (%) |
| ABF66654 | Ammopiptanthus | 91.40% |
| | mongolicus | |
| ABJ97690 | S. tuberosum | 87.70% |
| EAY97646 | O. sativa | 84.60% |
| NP_001055274 | O. sativa | 84.30% |
| AAB80919 | O. sativa | 82.80% |

TABLE 22C
Comparison of GMsae76c10 (SEQ ID NO: 168) to
known DNA binding proteins

| Public Database | | Sequence |
|---|---|---|
| Accession # | Species | Identity (%) |
| ABF66654 | A. mongolicus | 94.20% |
| ABJ97690 | S. tuberosum | 86.10% |
| EAY97646 | O. sativa | 83.90% |
| NP_001055274 | O. sativa | 83.60% |
| AAF91445 | Atriplex hortensis | 82.20% |

TABLE 23C
Comparison of ZM68403475 (SEQ ID NO: 170) to
known DNA binding proteins

| Public Database | | Sequence |
|---|---|---|
| Accession # | Species | Identity (%) |
| EAY97646 | O. sativa | 90.60% |
| NP_001055274 | O. sativa | 90.40% |
| AAB80919 | O. sativa | 88.60% |
| ABF66654 | A. mongolicus | 84.70% |
| ABJ97690 | S. tuberosum | 82.20% |

TABLE 24C
Comparison of ZMTD146063555 (SEQ ID NO: 172) to
known DNA binding proteins

| Public Database | | Sequence |
|---|---|---|
| Accession # | Species | Identity (%) |
| EAY97646 | O. sativa | 90.90% |
| NP_001055274 | O. sativa | 90.60% |
| AAB80919 | O. sativa | 88.80% |
| ABF66654 | A. mongolicus | 84.00% |
| ABJ97690 | S. tuberosum | 81.50% |

[0444] The full-length DNA sequence of BN48622391 (SEQ ID NO:176) was blasted against proprietary databases of canola, soybean, rice, maize, linseed, sunflower, and wheat cDNAs at an e value of e⁻¹⁰ (Altschul et al., 1997, Nucleic Acids Res. 25: 3389-3402). All the contig hits were analyzed for the putative full length sequences, and the longest clones representing the putative full length contigs were fully sequenced. One homolog from soybean and one homolog from corn were identified. The degree of amino acid identity of these sequences to the closest known public sequences is indicated in Tables 25C and 26C (Pairwise Comparison was used: gap penalty: 10; gap extension penalty: 0.1; score matrix: blosum62).

TABLE 25C
Comparison of GM50247805 (SEQ ID NO: 178) to
known rev interacting proteins

| Public Database | | Sequence |
|---|---|---|
| Accession # | Species | Identity (%) |
| NP_196459 | A. thaliana | 72.0% |
| AAM64563 | A. thaliana | 71.7% |
| NP_001064737 | O. sativa | 70.9% |
| BAD82278 | O. sativa | 62.3% |
| EAY75588 | O. sativa | 62.0% |

TABLE 26C
Comparison of ZM62208861 (SEQ ID NO: 180) to
known rev interacting proteins

| Public Database | | Sequence |
|---|---|---|
| Accession # | Species | Identity (%) |
| NP_001064737 | O. sativa | 82.90% |
| EAZ16285 | O. sativa | 74.30% |
| EAY78750 | O. sativa | 74.10% |
| BAD82278 | O. sativa | 72.80% |
| EAY75588 | O. sativa | 72.80% |

[0445] The full-length DNA sequence of the GM49819537 (SEQ ID NO: 182) was blasted against proprietary databases of canola, soybean, rice, maize, linseed, sunflower, and wheat cDNAs at an e value of e⁻¹⁰ (Altschul et al., 1997, Nucleic Acids Res. 25: 3389-3402). All the contig hits were analyzed for the putative full length sequences, and the longest clones representing the putative full length contigs were fully sequenced. One homolog from canola and two homologs from soybean were identified. The degree of amino acid identity of these sequences to the closest known public sequences is indicated in Tables 27C through 29C (Pairwise Comparison was used: gap penalty: 10; gap extension penalty: 0.1; score matrix: blosum62).

TABLE 27C
Comparison of BN42562310 (SEQ ID NO: 184) to
known GRF1 interacting factors

| Public Database | | Sequence |
|---|---|---|
| Accession # | Species | Identity (%) |
| NP_198216 | A. thaliana | 94.80% |
| NP_001051174 | O. sativa | 50.40% |
| ABQ01228 | Z. mays | 48.70% |
| EAY91764 | O. sativa | 40.80% |
| EAZ28484 | O. sativa | 40.50% |

TABLE 28C
Comparison of GM47121078 (SEQ ID NO: 186) to
known GRF1 interacting factors

| Public Database | | Sequence |
|---|---|---|
| Accession # | Species | Identity (%) |
| NP_198216 | A. thaliana | 65.20% |
| NP_001051174 | O. sativa | 51.10% |
| ABQ01228 | Z. mays | 50.40% |
| EAZ28484 | O. sativa | 40.80% |
| EAY91764 | O. sativa | 40.20% |

TABLE 29C
Comparison of GMsf89h03 (SEQ ID NO: 188) to
known GRF1 interacting factors

| Public Database | | Sequence |
|---|---|---|
| Accession # | Species | Identity (%) |
| AAB62864 | A. thaliana | 62.90% |
| NP_567194 | A. thaliana | 62.50% |
| NP_563619 | A. thaliana | 56.30% |
| ABQ01229 | Z. mays | 50.00% |
| NP_001068275 | O. sativa | 50.00% |

[0446] The full-length DNA sequence of the HA66670700 (SEQ ID NO: 190) was blasted against proprietary databases of canola, soybean, rice, maize, linseed, sunflower, and wheat cDNAs at an e value of e⁻¹⁰ (Altschul et al., 1997, Nucleic Acids Res. 25: 3389-3402). All the contig hits were analyzed for the putative full length sequences, and the longest clones representing the putative full length contigs were fully sequenced. Five homologs from soybean were identified. The degree of amino acid identity of these sequences to the closest known public sequences is indicated in Tables 30C through 34C (Pairwise Comparison was used: gap penalty: 10; gap extension penalty: 0.1; score matrix: blosum62).

TABLE 30C
Comparison of GM50390979 (SEQ ID NO: 192) to known
eukaryotic translation initiation factor 4A proteins

| Public Database | | Sequence |
|---|---|---|
| Accession # | Species | Identity (%) |
| CAN61608 | V. vinifera | 95.20% |
| Q40465 | N. tabacum | 94.40% |
| P41382 | N. tabacum | 94.20% |
| ABE81297 | M. truncatula | 94.20% |
| Q40467 | N. tabacum | 93.70% |

TABLE 31C
Comparison of GM59720014 (SEQ ID NO: 194) to known
eukaryotic translation initiation factor 4A proteins

| Public Database | | Sequence |
|---|---|---|
| Accession # | Species | Identity (%) |
| CAA76677 | P. sativum | 90.70% |
| CAN62124 | V. vinifera | 90.00% |
| P41380 | N. plumbaginifolia | 87.20% |
| NP_001043673 | O. sativa | 86.70% |
| NP_001050506 | O. sativa | 86.20% |

TABLE 32C
Comparison of GMsab62c11 (SEQ ID NO: 196) to known
eukaryotic translation initiation factor 4A proteins

| Public Database | | Sequence |
|---|---|---|
| Accession # | Species | Identity (%) |
| CAN61608 | V. vinifera | 95.40% |
| P41382 | N. tabacum | 94.20% |
| AAR23806 | H. annuus | 94.20% |
| Q40468 | N. tabacum | 94.20% |
| Q40471 | N. tabacum | 93.90% |

TABLE 33C
Comparison of GMsl42e03 (SEQ ID NO: 198) to known
eukaryotic translation initiation factor 4A proteins

| Public Database | | Sequence |
|---|---|---|
| Accession # | Species | Identity (%) |
| CAN61608 | V. vinifera | 95.60% |
| ABN09109 | M. truncatula | 94.90% |
| AAR23806 | H. annuus | 94.70% |
| AAN74635 | P. sativum | 94.40% |
| Q40468 | N. tabacum | 94.40% |

TABLE 34C
Comparison of GMss72c01 (SEQ ID NO: 200) to known
eukaryotic translation initiation factor 4A proteins

| Public Database | | Sequence |
|---|---|---|
| Accession # | Species | Identity (%) |
| CAN61608 | V. vinifera | 95.40% |
| P41382 | N. tabacum | 94.40% |
| Q40465 | N. tabacum | 94.20% |
| ABE81297 | M. truncatula | 94.20% |
| Q40467 | N. tabacum | 93.90% |

[0447] The full-length DNA sequence of the ZM62043790 (SEQ ID NO: 154) was blasted against proprietary databases of canola, soybean, rice, maize, linseed, sunflower, and wheat cDNAs at an e value of e⁻¹⁰ (Altschul et al., 1997, Nucleic Acids Res. 25: 3389-3402). All the contig hits were analyzed for the putative full length sequences, and the longest clones representing the putative full length contigs were fully sequenced. Two homologs from soybean were identified. The degree of amino acid identity of these sequences to the closest known public sequences is indicated in Tables 19C and 20C (Pairwise Comparison was used: gap penalty: 10; gap extension penalty: 0.1; score matrix: blosum62).

TABLE 35C
Comparison of GMsk21g122 (SEQ ID NO: 156) to
known TGF beta receptor interacting proteins

| Public Database | | Sequence |
|---|---|---|
| Accession # | Species | Identity (%) |
| AAK49947 | Phaseolus | 93.60% |
| | vulgaris | |
| ABO78477 | M. truncatula | 90.50% |
| CAN80198 | V. vinifera | 89.30% |
| NP_001055036 | O. sativa | 82.80% |
| AAK43862 | A. thaliana | 81.40% |

TABLE 36C
Comparison of GMsk21ga12 (SEQ ID NO: 152) to
known TGF beta receptor interacting proteins

| Public Database | | Sequence |
|---|---|---|
| Accession # | Species | Identity (%) |
| AAK49947 | P. vulgaris | 94.20% |
| ABO78477 | M. truncatula | 90.50% |
| CAN80198 | V. vinifera | 90.20% |
| NP_001055036 | O. sativa | 82.30% |
| AAK43862 | A. thaliana | 80.80% |

TABLE 2D
Comparison of EST285 (SEQ ID NO: 208) to known AP2
domain containing proteins

| Public Database | | Sequence |
|---|---|---|
| Accession # | Species | Identity (%) |
| ABA43687 | P. patens | 39.50% |
| ABE80929 | Medicago | 38.00% |
| | truncatula | |
| NP_181113 | A. thaliana | 37.30% |
| ABK28523 | A. thaliana | 37.20% |
| NP_174636 | A. thaliana | 37.00% |

TABLE 3D
Comparison of ZM100324 (SEQ ID NO: 212) to known AP2
domain containing proteins

| Public Database | | Sequence |
|---|---|---|
| Accession # | Species | Identity (%) |
| AAX28957 | H. vulgare | 56.20% |
| BAC20185 | Prunus avium | 51.10% |
| ABD72616 | A. thaliana | 49.40% |
| AAT65201 | Glycine soja | 47.90% |
| AAY21898 | Chorispora | 45.80% |
| | bungeana | |

[0448] The full-length DNA sequence of the EST285 (SEQ ID NO: 208) and ZM100324 (SEQ ID NO:212) were blasted against proprietary databases of canola, soybean, rice, maize, linseed, sunflower, and wheat cDNAs at an e value of e⁻¹⁰ (Altschul et al., 1997, Nucleic Acids Res. 25: 3389-3402). All the contig hits were analyzed for the putative full length sequences, and the longest clones representing the putative full length contigs were fully sequenced. Six homologs from canola, four homologs from soybean, four homologs from sunflower, three homologs from linseed, three homologs from wheat, and one homolog from corn were identified. The degree of amino acid identity of these sequences to the closest known public sequences is indicated in Tables 19D and 20D (Pairwise Comparison was used: gap penalty: 10; gap extension penalty: 0.1; score matrix: blosum62).

TABLE 4D
Comparison of BN42471769 (SEQ ID NO: 210) to known AP2
domain containing proteins

| | | Sequence Identity |
|---|---|---|
| Public Database Accession # | Species | (%) |
| NP_197953 | A. thaliana | 80.40% |
| NP_196720 | A. thaliana | 59.50% |
| BAD01554 | Cucumis melo | 52.30% |
| ABE80929 | M. truncatula | 48.90% |
| NP_195006 | A. thaliana | 47.40% |

TABLE 5D
Comparison of BN42817730 (SEQ ID NO: 214) to known AP2
domain containing proteins

| | | Sequence Identity |
|---|---|---|
| Public Database Accession # | Species | (%) |
| ABA54282 | B. napus | 73.00% |
| AAW28084 | B. napus | 73.00% |
| ABA54281 | B. napus | 72.50% |
| ABA54280 | B. napus | 72.00% |
| NP_181113 | A. thaliana | 71.20% |

TABLE 6D
Comparison of BN45236208 (SEQ ID NO: 216) to known AP2
domain containing proteins

| | | Sequence Identity |
|---|---|---|
| Public Database Accession # | Species | (%) |
| NP_173609 | A. thaliana | 73.80% |
| AAM63137 | A. thaliana | 73.50% |
| NP_177887 | A. thaliana | 58.50% |
| BAD43987 | A. thaliana | 56.90% |
| NP_175104 | A. thaliana | 50.20% |

TABLE 7D
Comparison of BN46730374 (SEQ ID NO: 218) to known AP2
domain containing proteins

| Public Database | | |
|---|---|---|
| Accession # | Species | Sequence Identity (%) |
| NP_173355 | A. thaliana | 74.10% |
| AAF82238 | A. thaliana | 73.80% |
| ABB36646 | G. max | 51.00% |
| BAF47194 | Daucus carota | 49.00% |
| NP_680184 | A. thaliana | 42.40% |

TABLE 8D
Comparison of BN46832560 (SEQ ID NO: 220) to known AP2
domain containing proteins

| | | Sequence Identity |
|---|---|---|
| Public Database Accession # | Species | (%) |
| NP_193408 | A. thaliana | 85.80% |
| NP_181113 | A. thaliana | 66.20% |
| ABK28523 | A. thaliana | 65.80% |
| AAW28084 | B. napus | 64.60% |
| ABA54282 | B. napus | 64.10% |

TABLE 9D
Comparison of BN46868821 (SEQ ID NO: 222) to known AP2
domain containing proteins

| | | Sequence Identity |
|---|---|---|
| Public Database Accession # | Species | (%) |
| NP_177844 | A. thaliana | 83.50% |
| ABK28471 | A. thaliana | 83.10% |
| NP_195006 | A. thaliana | 46.60% |
| NP_565609 | A. thaliana | 45.60% |
| NP_188249 | A. thaliana | 44.20% |

TABLE 10D
Comparison of GM48927342 (SEQ ID NO: 224) to known AP2
domain containing proteins

| | | Sequence Identity |
|---|---|---|
| Public Database Accession # | Species | (%) |
| BAD01554 | C. melo | 48.60% |
| NP_196720 | A. thaliana | 47.70% |
| NP_188249 | A. thaliana | 45.80% |
| NP_177844 | A. thaliana | 44.60% |
| ABE80929 | M. truncatula | 44.50% |

TABLE 11D
Comparison of GM48955695 (SEQ ID NO: 226) to known AP2
domain containing proteins

| Public Database Accession # | Species | Sequence Identity (%) |
|---|---|---|
| ABB36646 | G. max | 39.80% |
| NP_173355 | A. thaliana | 39.10% |
| BAF47194 | D. carota | 38.30% |
| AAF82238 | A. thaliana | 37.10% |
| EAZ07208 | O. sativa | 35.10% |

TABLE 12D
Comparison of GM48958569 (SEQ ID NO: 228) to known AP2
domain containing proteins

| Public Database Accession # | Species | Sequence Identity (%) |
|---|---|---|
| ABK28850 | M. truncatula | 75.20% |
| ABQ85893 | P. sativum | 69.40% |
| ABE86412 | M. truncatula | 54.30% |
| ABE86412 | M. truncatula | 54.30% |
| EAZ03158 | O. sativa | 42.60% |

TABLE 13D
Comparison of GM50526381 (SEQ ID NO: 230) to known AP2
domain containing proteins

| Public Database Accession # | Species | Sequence Identity (%) |
|---|---|---|
| ABB36646 | G. max | 56.00% |
| NP_173355 | A. thaliana | 46.40% |
| BAF47194 | D. carota | 45.50% |
| AAF82238 | A. thaliana | 45.50% |
| NP_680184 | A. thaliana | 42.70% |

TABLE 14D
Comparison of HA66511283 (SEQ ID NO: 232) to known AP2
domain containing proteins

| Public Database | | |
|---|---|---|
| Accession # | Species | Sequence Identity (%) |
| AAS82861 | H. annuus | 36.90% |
| CAB93939 | Catharanthus roseus | 31.40% |
| AAN77051 | L. esculentum | 31.00% |
| NP_001042107 | O. sativa | 30.30% |
| ABQ59087 | Populus alba x Populus x | 30.10% |
| | berolinensis | |

TABLE 15D
Comparison of HA66563970 (SEQ ID NO: 234) to known AP2
domain containing proteins

| | | Sequence Identity |
|---|---|---|
| Public Database Accession # | Species | (%) |
| ABQ42205 | G. max | 47.80% |
| CAH67505 | O. sativa | 45.80% |
| NP_001053487 | O. sativa | 45.50% |
| ABA54281 | B. napus | 45.50% |
| ABA54280 | B. napus | 45.50% |

TABLE 16D
Comparison of HA66692703 (SEQ ID NO: 236) to known AP2
domain containing proteins

| | | Sequence Identity |
|---|---|---|
| Public Database Accession # | Species | (%) |
| AAS20427 | C. annuum | 52.00% |
| AAO34704 | L. esculentum | 49.50% |
| AAR87866 | L. esculentum | 49.50% |
| BAD01556 | C. melo | 48.40% |
| ABE84970 | M. truncatula | 44.30% |

TABLE 17D
Comparison of HA66822928 (SEQ ID NO: 238) to known
AP2 domain containing proteins

| Public Database | | |
|---|---|---|
| Accession # | Species | Sequence Identity (%) |
| AAY89658 | G. max | 56.40% |
| ABB36645 | G. max | 56.40% |
| CAN64037 | V. vinifera | 56.10% |
| AAQ08000 | G. hirsutum | 55.80% |
| NP_179915 | A. thaliana | 53.90% |

TABLE 18D
Comparison of LU61569679 (SEQ ID NO: 240) to
known AP2 domain containing proteins

| Public Database | | Sequence |
|---|---|---|
| Accession # | Species | Identity (%) |
| NP_177681 | A. thaliana | 50.90% |
| ABK59671 | A. thaliana | 50.40% |
| CAN60823 | V. vinifera | 44.50% |
| CAN66064 | V. vinifera | 43.30% |
| ABP02847 | M. truncatula | 35.90% |

TABLE 19D
Comparison of LU61703351 (SEQ ID NO: 242) to
known AP2 domain containing proteins

| Public Database | | |
|---|---|---|
| Accession # | Species | Sequence Identity (%) |
| ABK59671 | A. thaliana | 42.90% |
| NP_177681 | A. thaliana | 42.30% |
| CAN60823 | V. vinifera | 38.20% |
| CAN66064 | V. vinifera | 35.90% |
| EAZ08049 | O. sativa | 32.50% |

TABLE 20D
Comparison of LU61962194 (SEQ ID NO: 244) to
known AP2 domain containing proteins

| Public Database | | |
|---|---|---|
| Accession # | Species | Sequence Identity (%) |
| CAN63728 | V. vinifera | 50.00% |
| ABC69353 | M. truncatula | 49.60% |
| AAQ96342 | V. aestivalis | 47.20% |
| CAN80071 | V. vinifera | 46.50% |
| AAD09248 | Stylosanthes | 46.10% |
| | hamata | |

TABLE 21D
Comparison of TA54564073 (SEQ ID NO: 246) to
known AP2 domain containing proteins

| Public Database | | |
|---|---|---|
| Accession # | Species | Sequence Identity (%) |
| AAX13289 | T. aestivum | 75.20% |
| ABA08426 | T. aestivum | 72.00% |
| AAY44604 | T. aestivum | 67.60% |
| AAU29412 | Hordeum | 67.40% |
| | brevisubulatum | |
| AAL01124 | T. aestivum | 67.30% |

TABLE 22D
Comparison of TA54788773 (SEQ ID NO: 248) to
known AP2 domain containing proteins

| Public Database | | |
|---|---|---|
| Accession # | Species | Sequence Identity (%) |
| ABB51574 | C. annuum | 31.70% |
| EAZ36121 | O. sativa | 17.00% |
| CAD56466 | T. aestivum | 15.20% |
| AAX13280 | T. aestivum | 14.90% |
| EAY87770 | O. sativa | 14.80% |

TABLE 23D
Comparison of TA56412836 (SEQ ID NO: 250) to
known AP2 domain containing proteins

| Public Database | | Sequence Identity |
|---|---|---|
| Accession # | Species | (%) |
| EAY86936 | O. sativa | 72.80% |
| NP_001047614 | O. sativa | 72.80% |
| CAC39058 | O. sativa | 72.50% |
| ABQ52686 | Thinopyrum | 72.40% |
| | intermedium | |
| ABQ52687 | T. aestivum | 67.80% |

TABLE 24D
Comparison of ZM65144673 (SEQ ID NO: 252) to
known AP2 domain containing proteins

| Public Database | | Sequence Identity |
|---|---|---|
| Accession # | Species | (%) |
| ABP65298 | O. sativa | 63.30% |
| EAY87770 | O. sativa | 53.40% |
| NP_001048319 | O. sativa | 52.10% |
| EAZ36121 | O. sativa | 51.90% |
| AAF23899 | O. sativa | 50.70% |

TABLE 2E
Comparison of EST314 (SEQ ID NO: 254) to known
brassinosteroid biosynthetic LKB-like proteins

| Public Database | | |
|---|---|---|
| Accession # | Species | Sequence Identity (%) |
| CAN79299 | Vitis vinifera | 74.20% |
| AAK15493 | Pisum sativum | 73.90% |
| P93472 | P. sativum | 73.50% |
| AAM47602 | Gossypium hirsutum | 73.50% |
| AAL91175 | A. thaliana | 72.30% |

TABLE 3E
Comparison of EST322 (SEQ ID NO: 256) to
known RING-box proteins

| Public Database | | |
|---|---|---|
| Accession # | Species | Sequence Identity (%) |
| EDK43882 | Lodderomyces | 46.50% |
| | elongisporus | |
| AAT10276 | Fragaria x ananassa | 25.50% |
| CAF93382 | Tetraodon nigroviridis | 24.90% |
| XP_001249317 | Bos taurus | 24.70% |
| XP_637131 | Dictyostelium discoideum | 24.70% |

TABLE 4E
Comparison of EST589 (SEQ ID NO: 258) to known
serine/threonine protein phosphatases

| Public Database | | |
|---|---|---|
| Accession # | Species | Sequence Identity (%) |
| NP_001062774 | O. sativa | 89.30% |
| NP_200337 | A. thaliana | 89.20% |
| CAA80312 | A. thaliana | 88.90% |
| XP_799172 | Strongylocentrotus purpuratus | 84.40% |
| NP_988943 | Xenopus tropicalis | 83.70% |

[0449] The full-length DNA sequence of the serine/threonine protein phosphatase EST589 (SEQ ID NO:258) was blasted against proprietary databases of canola, soybean, rice, maize, linseed, sunflower, and wheat cDNAs at an e value of e⁻¹⁰ (Altschul et al., 1997, Nucleic Acids Res. 25: 3389-3402). All the contig hits were analyzed for the putative full length sequences, and the longest clones representing the putative full length contigs were fully sequenced. Five homologs from canola, three homologs from soybean, one homolog from sunflower, three homologs from linseed, one homolog from wheat and one homolog from corn were identified. The degree of amino acid identity of these sequences to the closest known public sequences is indicated in Tables 5E through 18E (Pairwise Comparison was used: gap penalty: 10; gap extension penalty: 0.1; score matrix: blosum62).

TABLE 5E
Comparison of BN45899621 (SEQ ID NO: 260) to
known serine/threonine protein phosphatases

| Public Database | | |
|---|---|---|
| Accession # | Species | Sequence Identity (%) |
| NP_188632 | A. thaliana | 97.00% |
| NP_175454 | A. thaliana | 96.70% |
| BAE98396 | A. thaliana | 96.40% |
| AAM21172 | P. sativum | 94.70% |
| CAA87385 | Malus x domestica | 94.70% |

TABLE 6E
Comparison of BN51334240 (SEQ ID NO: 262) to
known serine/threonine protein phosphatases

| Public Database | | |
|---|---|---|
| Accession # | Species | Sequence Identity (%) |
| NP_200337 | A. thaliana | 93.10% |
| CAA80312 | A. thaliana | 92.80% |
| NP_194402 | A. thaliana | 92.50% |
| NP_001062774 | O. sativa | 90.60% |
| XP_001435846 | Paramecium tetraurelia | 81.10% |

TABLE 7E
Comparison of BN51345476 (SEQ ID NO: 264) to
known serine/threonine protein phosphatases

| Public Database | | |
|---|---|---|
| Accession # | Species | Sequence Identity (%) |
| P23778 | B. napus | 94.90% |
| Q06009 | Medicago sativa | 94.60% |
| S12986 | B. napus | 94.60% |
| NP_565974 | A. thaliana | 86.60% |

TABLE 8E
Comparison of BN42856089 (SEQ ID NO: 266) to
known serine/threonine protein phosphatases

| Public Database | | |
|---|---|---|
| Accession # | Species | Sequence Identity (%) |
| NP_172514 | A. thaliana | 97.10% |
| AAM65099 | A. thaliana | 95.80% |
| AAQ67226 | Lycopersicon esculentum | 95.40% |
| BAA92697 | V. faba | 95.10% |
| NP_176192 | A. thaliana | 79.40% |

TABLE 9E
Comparison of BN43206527 (SEQ ID NO: 268) to
known serine/threonine protein phosphatases

| Public Database | | Sequence |
|---|---|---|
| Accession # | Species | Identity (%) |
| NP_172514 | A. thaliana | 97.40% |
| AAM65099 | A. thaliana | 96.10% |
| AAQ67226 | L. esculentum | 95.10% |
| BAA92697 | V. faba | 94.10% |
| NP_176192 | A. thaliana | 79.70% |

TABLE 10E
Comparison of GMsf85h09 (SEQ ID NO: 270) to
known serine/threonine protein phosphatases

| Public Database | | Sequence |
|---|---|---|
| Accession # | Species | Identity (%) |
| NP_200337 | A. thaliana | 93.80% |
| CAA80312 | A. thaliana | 93.20% |
| NP_001062774 | O. sativa | 92.90% |
| NP_194402 | A. thaliana | 86.90% |
| NP_988943 | X. tropicalis | 82.80% |

TABLE 11E
Comparison of GMsj98e01 (SEQ ID NO: 272) to
known serine/threonine protein phosphatases

| Public Database | | Sequence |
|---|---|---|
| Accession # | Species | Identity (%) |
| BAA92699 | V. faba | 94.60% |
| Q06009 | M. sativa | 93.90% |
| CAN78260 | V. vinifera | 92.70% |
| NP_565974 | A. thaliana | 81.80% |

TABLE 12E
Comparison of GMsu65h07 (SEQ ID NO: 274) to
known serine/threonine protein phosphatases

| Public Database | | Sequence |
|---|---|---|
| Accession # | Species | Identity (%) |
| BAA92697 | V. faba | 98.70% |
| CAC11129 | F. sylvatica | 98.40% |
| AAQ67226 | L. esculentum | 97.40% |
| BAA92698 | V. faba | 96.70% |
| Q9ZSE4 | Hevea brasiliensis | 96.40% |

TABLE 13E
Comparison of HA66777473 (SEQ ID NO: 276) to
known serine/threonine protein phosphatases

| Public Database | | Sequence |
|---|---|---|
| Accession # | Species | Identity (%) |
| CAN78260 | V. vinifera | 93.30% |
| ABE78681 | Medicago truncatula | 91.70% |
| Q06009 | M. sativa | 90.70% |
| BAA92699 | V. faba | 90.40% |
| NP_001051627 | O. sativa | 52.90% |

TABLE 14E
Comparison of LU61781371 (SEQ ID NO: 278) to
known serine/threonine protein phosphatases

| Public Database | | Sequence |
|---|---|---|
| Accession # | Species | Identity (%) |
| NP_200337 | A. thaliana | 95.10% |
| CAA80312 | A. thaliana | 94.40% |
| NP_001062774 | O. sativa | 92.80% |
| NP_194402 | A. thaliana | 86.90% |

TABLE 15E
Comparison of LU61589678 (SEQ ID NO: 280) to
known serine/threonine protein phosphatases

| Public Database | | Sequence |
|---|---|---|
| Accession # | Species | Identity (%) |
| AAM21172 | P. sativum | 97.40% |
| CAA87385 | Malus × domestica | 97.40% |
| NP_175454 | A. thaliana | 96.00% |
| NP_188632 | A. thaliana | 95.70% |
| BAE98396 | A. thaliana | 95.70% |

TABLE 16E
Comparison of LU61857781 (SEQ ID NO: 282) to
known serine/threonine protein phosphatases

| Public Database | | Sequence |
|---|---|---|
| Accession # | Species | Identity (%) |
| CAN78260 | V. vinifera | 97.10% |
| ABE78681 | M. truncatula | 95.20% |
| Q9XGH7 | Nicotiana tabacum | 94.60% |
| NP_565974 | A. thaliana | 82.90% |

TABLE 17E
Comparison of TA55079288 (SEQ ID NO: 284) to
known serine/threonine protein phosphatases

| Public Database | | Sequence |
|---|---|---|
| Accession # | Species | Identity (%) |
| ABE78681 | M. truncatula | 92.90% |
| Q9XGH7 | N. tabacum | 92.60% |
| CAN78260 | V. vinifera | 92.40% |
| NP_001051627 | O. sativa | 56.00% |

TABLE 18E
Comparison of ZM59400933 (SEQ ID NO: 286) to
known serine/threonine protein phosphatases

| Public Database | | Sequence |
|---|---|---|
| Accession # | Species | Identity (%) |
| AAC72838 | O. sativa | 95.80% |
| AAA91806 | O. sativa | 94.40% |
| BAA92697 | V. faba | 92.80% |
| NP_001057926 | O. sativa | 82.80% |
| NP_001046300 | O. sativa | 78.90% |

### Example 2

### Characterization of Genes

[0450] Lead genes b1805 (SEQ ID NO:287), YER015W (SEQ ID NO:289), b1091 (SEQ ID NO:317), b0185 (SEQ ID NO:319), b3256 (SEQ ID NO:321), b3255 (SEQ ID NO:329), b1095 (SEQ ID NO:335), b1093 (SEQ ID NO:343), slr0886 (SEQ ID NO:345), and slr1364 (SEQ ID NO:397) were cloned using standard recombinant techniques. The functionality of each lead gene was predicted by comparing the amino acid sequence of the gene with other genes of known functionality. Homolog cDNAs were isolated from proprietary libraries of the respective species using known methods. Sequences were processed and annotated using bioinformatics analyses. The degrees of amino acid identity of the isolated sequences to the respective closest known public sequences (Pairwise Comparison was used: gap penalty: 10; gap extension penalty: 0.1; score matrix: blosum. 62) were used in the selection of homologous sequences as indicated in Tables 2F through 11F

TABLE 2F
Comparison of b1805 (SEQ ID NO: 288) to
known long-chain-fatty-acid-CoA ligase subunits
of acyl-CoA synthetase

| Public Database | | Sequence |
|---|---|---|
| Accession # | Species | Identity (%) |
| YP_407739 | Shigella boydii | 99.60% |
| NP_288241 | Escherichia coli | 99.50% |
| YP_310302 | Shigella sonnei | 99.50% |
| ZP_00709029 | Escherichia coli | 98.10% |

TABLE 3F
Comparison of YER015W (SEQ ID NO: 290) to
known long-chain-fatty-acid-CoA ligase
subunits of acyl-CoA synthetase

| Public Database | | Sequence |
|---|---|---|
| Accession # | Species | Identity (%) |
| XP_001643054 | Vanderwaltozyma polyspora | 66.10% |
| XP_447210 | Candida glabrata | 65.40% |
| XP_452045 | Kluyveromyces lactis | 52.30% |
| NP_984148 | Ashbya gossypii | 47.80% |

[0451] The b1805 (SEQ ID NO:287), and YER015W (SEQ ID NO:289) genes, from E. coli and S. cerevisiae, respectively, encode a subunit of acyl-CoA synthetase (long-chain-fatty-acid-CoA ligase, EC 6.2.1.3). The full-length DNA sequences of these genes were blasted against proprietary databases of soybean and maize cDNAs at an e value of e-10 (Altschul et al., 1997, Nucleic Acids Res. 25: 3389-3402). Six homologs from soybean, and seven homologs from corn were identified. The amino acid relatedness of these sequences is indicated in the alignments shown in FIG. 17.

TABLE 4F
Comparison of b1091 (SEQ ID NO: 318) to
known beta-ketoacyl-ACP synthases

| Public Database | | Sequence |
|---|---|---|
| Accession # | Species | Identity (%) |
| NP_287225 | Escherichia coli | 83.60% |
| YP_403645 | Shigella dysenteriae | 83.40% |
| NP_707007 | Shigella flexneri | 83.40% |
| ZP_00735938 | Escherichia coli | 83.40% |
| 1MZS | Escherichia coli | 83.40% |

TABLE 5F
Comparison of b0185 (SEQ ID NO: 320) to
known acetyl-CoA carboxylase complex alpha subunits

| Public Database | | Sequence |
|---|---|---|
| Accession # | Species | Identity (%) |
| YP_539241 | Escherichia coli | 99.70% |
| YP_309224 | Shigella sonnei | 99.70% |
| YP_406731 | Shigella boydii | 99.70% |
| ZP_00920451 | Shigella dysenteriae | 99.70% |

TABLE 6F
Comparison of b3256 (SEQ ID NO: 322) to known
biotin carboxylase subunits of acetyl CoA carboxylase

| Public Database | | Sequence |
|---|---|---|
| Accession # | Species | Identity (%) |
| ZP_00721902 | Escherichia coli | 99.80% |
| NP_312155 | Escherichia coli | 99.80% |
| NP_838758 | Shigella flexneriT | 99.80% |
| ZP_00923176 | Escherichia coli | 99.80% |

[0452] The b3256 gene (SEQ ID NO:321) from E. coli encodes a biotin-dependent carboxylase subunit of ACC. The full-length DNA sequence of this gene was blasted against a proprietary database of canola and soybean cDNAs at an e value of e⁻¹⁰ (Altschul et al., supra). One homolog from canola and two homologs from soybean were identified. The amino acid relatedness of these sequences is indicated in the alignments shown in FIG. 18.

TABLE 7F
Comparison of b3255 (SEQ ID NO: 330) to known biotin carboxyl
carrier protein subunits of acetyl-CoA carboxylase

| | | Sequence |
|---|---|---|
| Public Database Accession # | Species | Identity (%) |
| YP_404913 | Shigella dysenteriae | 99.40% |
| YP_001573179 | Salmonella enterica | 93.60% |
| NP_457755 | Salmonella enterica | 92.90% |
| YP_001456152 | Citrobacter koseri | 92.40% |

[0453] The b3255 gene (SEQ ID NO:329) from E. coli encodes a biotin carboxyl carrier protein subunit of ACC. The full-length DNA sequence of this gene was blasted against a proprietary database of canola cDNAs at an e value of e⁻¹⁰ (Altschul et al., supra). Two homologs from canola were identified. The amino acid relatedness of these sequences is indicated in the alignments shown in FIG. 19.

TABLE 8F
Comparison of b1095 (SEQ ID NO: 336) to known
3-oxoacyl-[acyl-carrier-protein] synthase II

| | | Sequence |
|---|---|---|
| Public Database Accession # | Species | Identity (%) |
| YP_310075 | Shigella sonnei | 99.80% |
| YP_540234 | Escherichia coli | 99.80% |
| ZP_01702199 | Escherichia coli | 99.80% |
| 1B3N | Escherichia coli | 99.80% |

[0454] The b1095 (SEQ ID NO:335) gene encodes a 3-oxoacyl-[acyl-carrier-protein] synthase II in E coli. The full-length DNA sequence of the b1095 was blasted against a proprietary database of soybean cDNAs at an e value of e⁻¹⁰ (Altschul et al., supra). Three homologs from soybean were identified. The amino acid relatedness of these sequences is indicated in the alignments shown in FIG. 20.

TABLE 9F
Comparison of b1093 (SEQ ID NO: 344) to known
3-oxoacyl-[acyl-carrier-protein] reductases

| | | Sequence |
|---|---|---|
| Public Database Accession # | Species | Identity (%) |
| NP_287227 | Escherichia coli | 99.60% |
| AAA23739 | Escherichia coli | 99.60% |
| 1Q7C | Escherichia coli | 99.60% |
| YP_403643 | Shigella dysenteriae | 99.60% |

TABLE 10F
Comparison of slr0886 (SEQ ID NO: 346) to known
3-oxoacyl-[acyl-carrier-protein] reductases

| | | Sequence |
|---|---|---|
| Public Database Accession # | Species | Identity (%) |
| YP_001519901 | Acaryochloris marina | 80.60% |
| YP_324264 | Anabaena variabilis | 78.90% |
| NP_485934 | Nostoc sp. PCC 7120 | 78.50% |
| ZP_01631414 | Nodularia spumigena | 77.00% |

[0455] Genes b1093 (SEQ ID NO:343) and slr0886 (SEQ ID NO:345) encode 3-oxoacyl-ACP reductases in E. coli and Synechocystis sp. pcc6803, respectively. The full-length DNA sequences of these genes were blasted against proprietary databases of canola, soybean, rice, maize, and linseed cDNAs at an e value of e⁻¹⁰ (Altschul et al., supra). Three homologs from canola, seven homologs from maize, one homolog from linseed, one homolog from rice, one homolog from barley and twelve homologs from soybean were identified. The amino acid relatedness of these sequences is indicated in the alignments shown in FIG. 21.

TABLE 11F
Comparison of slr1364 (SEQ ID NO: 398) to known biotin synthetases

| | | Sequence |
|---|---|---|
| Public Database Accession # | Species | Identity (%) |
| ZP_00514954 | Crocosphaera watsonii | 74.80% |
| ZP_01728784 | Cyanothece sp. | 74.80% |
| YP_723094 | Trichodesmium erythraeum | 73.00% |
| CAO89443 | Microcystis aeruginosa | 72.50% |

[0456] The full-length DNA sequence of slr1364 (SEQ ID NO:397) encodes a biotin synthetase from Synechocystis sp. pcc6803. The full-length DNA sequences of this gene were blasted against proprietary databases of canola and maize cDNAs at an e value of e⁻¹⁰ (Altschul et al., supra). One homolog each from canola and maize was identified. The amino acid relatedness of these sequences is indicated in the alignments shown in FIG. 22.

### Example 3

### Characterization of Genes

[0457] Sterol pathway genes B0421 (SEQ ID NO:413), YJL167W (SEQ ID NO:415), SQS1 (SEQ ID NO:435), and YGR175c (SEQ ID NO:443) were cloned using standard recombinant techniques. The functionality of each sterol pathway gene was predicted by comparing the amino acid sequence of the gene with other genes of known functionality. Homolog cDNAs were isolated from proprietary libraries of the respective species using known methods. Sequences were processed and annotated using bioinformatics analyses. The degrees of amino acid identity of the isolated sequences to the respective closest known public sequences are indicated in Tables 2G through 5G (Pairwise Comparison was used: gap penalty: 11; gap extension penalty: 1; score matrix: blosum62). The degrees of amino acid identity and similarity of the isolated sequences to the respective closest known public sequences were used in the selection of homologous sequences as described below.

TABLE 2G
Comparison of B0421 (SEQ ID NO: 414)
to known farnesyl diphosphate synthases

| | | Sequence |
|---|---|---|
| Public Database Accession # | Species | Identity (%) |
| 1RQI | Escherichia coli | 99.70% |
| ZP_00921756 | Shigella dysenteriae | 99.70% |
| ZP_01700053 | Escherichia coli | 99.70% |
| ZP_00710166 | Escherichia coli | 99.70% |

TABLE 3G
Comparison of YJL167W (SEQ ID NO: 416)
to known farnesyl diphosphate synthases

| | | Sequence |
|---|---|---|
| Public Database Accession # | Species | Identity (%) |
| EDN63217 | Saccharomyces cerevisiae | 99.70% |
| XP_001646858 | Vanderwaltozyma | 77.60% |
| | polyspora | |
| XP_448787 | Candida glabrata | 77.60% |
| XP_451300 | Kluyveromyces lactis | 74.50% |

[0458] The B0421 (SEQ ID NO:414), and YJL167W (SEQ ID NO:416) genes, from E. coli and S. cerevisiae, respectively, encode FPS. The full-length DNA sequences of these genes were blasted against proprietary databases of soybean and maize cDNAs at an e value of e-10 (Altschul et al., 1997, Nucleic Acids Res. 25: 3389-3402). Two homologs from canola, three homologs from soybean, two homologs from wheat and two homologs from corn were identified. The amino acid relatedness of these sequences is indicated in the alignments shown in FIG. 24.

TABLE 4G
Comparison of SQS1 (SEQ ID NO: 436) to known squalene synthases

| | | Sequence |
|---|---|---|
| Public Database Accession # | Species | Identity (%) |
| A9RRG4 | Physcomitrella patens | 76.68% |
| O22107 | Glycine max | 46.07% |
| Q84LE3 | Lotus japonicus | 45.98% |
| O22106 | Zea mays | 45.29% |
| Q6Z368 | Oryza sativa | 40.22% |

[0459] SQS1 (SEQ ID NO:435) and SQS2 (SEQ ID NO:437) are synthetic squalene synthase genes. The full-length DNA sequence of this gene was blasted against proprietary databases of canola and maize cDNAs at an e value of e⁻¹⁰ (Altschul et al., supra). One homolog each from canola, soybean and maize was identified. The amino acid relatedness of these sequences is indicated in the alignments shown in FIG. 25.

TABLE 5G
Comparison of YGR175C (SEQ ID NO: 444)
to known squalene expoxidases

| | | Sequence |
|---|---|---|
| Public Database Accession # | Species | Identity (%) |
| AAA34592 | Saccharomyces | 99.80% |
| | cerevisiae | |
| EDN61765 | Saccharomyces | 99.60% |
| | cerevisiae | |
| XP_445667 | Candida glabrata | 83.70% |
| XP_001646877 | Vanderwaltozyma | 77.30% |
| | polyspora | |

[0460] The full-length DNA sequence of YGR175C (SEQ ID NO:444) encodes a squalene expoxidase from S. cerevisiae. The full-length DNA sequence of this gene was blasted against proprietary databases of canola and maize cDNAs at an e value of e⁻¹⁰ (Altschul et al., supra). One homolog each from canola and maize was identified. The amino acid relatedness of these sequences is indicated in the alignments shown in FIG. 26.

### Example 4

### Overexpression of Lead Genes in Plants

[0461] The polynucleotides of Table 1F were ligated into an expression cassette using known methods. Three different promoters were used to control expression of the transgenes in Arabidopsis: the USP promoter from Vicia faba (SEQ ID NO:403 was used for expression of genes from Escherichia coli or SEQ ID NO:404 was used for expression of genes from Saccharomyces cerevisiae); the super promoter (SEQ ID NO:405); and the parsley ubiquitin promoter (SEQ ID NO:406). For targeted expression, the mitochondrial transit peptide from an Arabidopsis thaliana gene encoding mitochondrial isovaleryl-CoA dehydrogenase designated “Mit” in Tables 12F-24F. SEQ ID NO:407 was used for expression of genes from Escherichia coli or SEQ ID NO:408 was used for expression of genes from Saccharomyces cerevisiae. In addition, for targeted expression, the chloroplast transit peptide of an Spinacia oleracea gene encoding ferredoxin nitrite reductase designated “Chlor” in Tables 12F-22F (SEQ ID NO:409) was used.

[0462] The Arabidopsis ecotype C24 was transformed with constructs containing the lead genes described in Example 2 using known methods. Seeds from T2 transformed plants were pooled on the basis of the promoter driving the expression, gene source species and type of targeting (chloroplastic, mitochondrial and cytoplasmic). The seed pools were used in the primary screens for biomass under well watered and water limited growth conditions. Hits from pools in the primary screen were selected, molecular analysis performed and seed collected. The collected seeds were then used for analysis in secondary screens where a larger number of individuals for each transgenic event were analyzed. If plants from a construct were identified in the secondary screen as having increased biomass compared to the controls, it passed to the tertiary screen. In this screen, over 100 plants from all transgenic events for that construct were measured under well watered and drought growth conditions. The data from the transgenic plants were compared to wild type Arabidopsis plants or to plants grown from a pool of randomly selected transgenic Arabidopsis seeds using standard statistical procedures.

[0463] Plants that were grown under well watered conditions were watered to soil saturation twice a week. Images of the transgenic plants were taken at 17 and 21 days using a commercial imaging system. Alternatively, plants were grown under water limited growth conditions by watering to soil saturation infrequently which allowed the soil to dry between watering treatments. In these experiments, water was given on days 0, 8, and 19 after sowing. Images of the transgenic plants were taken at 20 and 27 days using a commercial imaging system.

[0464] Image analysis software was used to compare the images of the transgenic and control plants grown in the same experiment. The images were used to determine the relative size or biomass of the plants as pixels and the color of the plants as the ratio of dark green to total area. The latter ratio, termed the health index, was a measure of the relative amount of chlorophyll in the leaves and therefore the relative amount of leaf senescence or yellowing and was recorded at day 27 only. Variation exists among transgenic plants that contain the various lead genes, due to different sites of DNA insertion and other factors that impact the level or pattern of gene expression.

[0465] Tables 12F to 24F show the comparison of measurements of the Arabidopsis plants. Percent change indicates the measurement of the transgenic relative to the control plants as a percentage of the control non-transgenic plants; p value is the statistical significance of the difference between transgenic and control plants based on a T-test comparison of all independent events where NS indicates not significant at the 5% level of probabilty; No. of events indicates the total number of independent transgenic events tested in the experiment; No. of positive events indicates the total number of independent transgenic events that were larger than the control in the experiment; No. of negative events indicates the total number of independent transgenic events that were smaller than the control in the experiment. NS indicates not significant at the 5% level of probability.

### A. Long-Chain-Fatty-Acid-CoA Ligase Subunits of Acyl-CoA Synthetase

[0466] The gene designated b1805 (SEQ ID NO:287), encoding the long-chain-fatty-acid-CoA ligase subunit of acyl-CoA synthetase, was expressed in Arabidopsis using three different constructs controlled by the USP promoter: constructs with no subcellular targeting, constructs targeted to the chloroplast, and constructs targeted to mitochondria. The b1805 gene (SEQ ID NO:287) was also expressed in Arabidopsis using the Super promoter, without subcellular targeting. Table 12F sets forth biomass and health index data obtained from the Arabidopsis plants transformed with these constructs and tested under water-limiting conditions. Table 13F sets forth biomass and health index data obtained from the Arabidopsis plants transformed with b1805 (SEQ ID NO:287) under control of the Super promoter, without subcellular targeting, and tested under well-watered conditions.

TABLE 12F

| | | | | | | | No of | No. of |
|---|---|---|---|---|---|---|---|---|
| | | | | % | | No. of | Positive | Negative |
| Gene | Promoter | Targeting | Measurement | Change | p-Value | Events | Events | Events |
| b1805 | Super | none | Biomass at | −7.1 | NS | 6 | 1 | 5 |
| | | | day 20 | | | | | |
| b1805 | Super | none | Biomass at | −7.0 | NS | 6 | 1 | 5 |
| | | | day 27 | | | | | |
| b1805 | Super | none | Health index | −10.1 | 0.0037 | 6 | 2 | 4 |
| b1805 | USP | Mit | Biomass at | 53.0 | 0.0000 | 8 | 8 | 0 |
| | | | day 20 | | | | | |
| b1805 | USP | Mit | Biomass at | 20.3 | 0.0000 | 8 | 8 | 0 |
| | | | day 27 | | | | | |
| b1805 | USP | Mit | Health index | 19.8 | 0.0000 | 8 | 8 | 0 |
| b1805 | USP | none | Biomass at | 28.0 | 0.0001 | 5 | 4 | 1 |
| | | | day 20 | | | | | |
| b1805 | USP | none | Biomass at | 16.8 | 0.0024 | 5 | 4 | 1 |
| | | | day 27 | | | | | |
| b1805 | USP | none | Health index | 14.6 | 0.0000 | 5 | 4 | 1 |
| b1805 | USP | Chlor | Biomass at | 4.8 | NS | 5 | 3 | 2 |
| | | | day 20 | | | | | |
| b1805 | USP | Chlor | Biomass at | 3.5 | NS | 5 | 2 | 3 |
| | | | day 27 | | | | | |
| b1805 | USP | Chlor | Health index | −2.4 | NS | 5 | 3 | 2 |

[0467] Table 12F shows that Arabidopsis plants expressing b1805 (SEQ ID NO:287) without subcellular targeting or with targeting to mitochondria that were grown under water limiting conditions were significantly larger than the control plants that did not express b1805 (SEQ ID NO:287). In addition, these transgenic plants were darker green in color than the controls. This data indicates that the plants produced more chlorophyll or had less chlorophyll degradation during stress than the control plants. Table 12F also shows that the majority of independent transgenic events were larger than the controls. In addition, Table 12F shows that Arabidopsis plants expressing the b1805 gene with subcellular targeting to the chloroplast that were grown under water limiting conditions were similar in biomass and Health Index to the control plants that did not express the b1805 gene at two measuring times. Table 12F indicates that when transgenic Arabidopsis plants containing b1805 (SEQ ID NO:287) with no subcellular targeting under control of the Super promoter were grown under water limiting conditions, the transgenic plants were smaller than the control plants that did not express the b1805 gene at two measuring times indicating that these plants were more sensitive to water deprivation.

TABLE 13F

| | | | | | | | No. of | No. of |
|---|---|---|---|---|---|---|---|---|
| | | | | % | | No. of | Positive | Negative |
| Gene | Promoter | Targeting | Measurement | Change | p-Value | Events | Events | Events |
| b1805 | Super | none | Biomass at | 17.0 | 0.0000 | 6 | 6 | 0 |
| | | | day 17 | | | | | |
| b1805 | Super | none | Biomass at | 11.0 | 0.0000 | 6 | 6 | 0 |
| | | | day 21 | | | | | |
| b1805 | Super | none | Health index | −3.3 | NS | 6 | 1 | 5 |

[0468] Table 13F shows that Arabidopsis plants containing the b1805 gene (SEQ ID NO:287) in an expression cassette with no subcellular targeting under control of the Super promoter were significantly larger than control plants if grown under well watered conditions. Table 13F shows that the majority of independent transgenic events were larger than the controls in the well watered environment.

[0469] The gene designated YER015W (SEQ ID NO:289), encoding the long-chain-fatty-acid-CoA ligase subunit of acyl-CoA synthetase, was expressed in Arabidopsis using the USP promoter, with subcellular targeting to the mitochondria. Table 14F sets forth biomass and health index data obtained from Arabidopsis plants transformed with this construct.

TABLE 14F

| | | | | | | | No. of | No. of |
|---|---|---|---|---|---|---|---|---|
| | | | | % | | No. of | Positive | Negative |
| Gene | Promoter | Targeting | Measurement | Change | p-Value | Events | Events | Events |
| YER015W | USP | Mito | Biomass at | 23.5 | 0.0000 | 6 | 6 | 0 |
| | | | 17 days | | | | | |
| YER015W | USP | Mito | Biomass at | 16.7 | 0.0000 | 6 | 6 | 0 |
| | | | 21 days | | | | | |
| YER015W | USP | Mito | Health Index | 6.8 | 0.09 | 6 | 5 | 1 |

[0470] Table 14F shows that Arabidopsis plants that were grown under well watered conditions were significantly larger than the control plants that did not express YER015W (SEQ ID NO:290). Table 14F also shows that all independent transgenic events were larger than the controls in the well watered environment.

[0471] Tables 12F, 13F and 14F indicate that expression of a long-chain-fatty-acid-CoA ligase subunit of acyl-CoA synthetase will increase growth of plants, resulting in plants with larger biomass. The amount of water that the plants receive also influences growth and the plants with different constructs do not respond to the same extent to this stress. The promoter and the subcellular targeting used in the construct determines whether the plant is relatively more or less sensitive to the water deprivation.

### B. Beta-Ketoacyl-ACP Synthase

[0472] The b1091 gene (SEQ ID NO:317), which encodes a beta-ketoacyl-ACP synthase, was expressed in Arabidopsis using two constructs that had no subcellular targeting signal. In one construct, transcription was controlled by the USP promoter and in the second by the Super promoter. Table 15F sets forth biomass and health index data obtained from Arabidopsis plants transformed with these constructs and grown under well watered conditions.

TABLE 15F

| | | | | | | | No of | No. of |
|---|---|---|---|---|---|---|---|---|
| | | | | % | | No. of | Positive | Negative |
| Gene | Promoter | Targeting | Measurement | Change | p-Value | Events | Events | Events |
| b1091 | Super | None | Biomass at | −7.5 | 0.0458 | 5 | 1 | 4 |
| | | | day 17 | | | | | |
| b1091 | Super | None | Biomass at | −7.8 | 0.0109 | 5 | 1 | 4 |
| | | | day 21 | | | | | |
| b1091 | Super | None | Health index | −1.5 | NS | 5 | 2 | 3 |
| b1091 | USP | None | Biomass at | 8.2 | 0.0031 | 6 | 5 | 1 |
| | | | day 17 | | | | | |
| b1091 | USP | None | Biomass at | 7.4 | 0.0002 | 6 | 6 | 0 |
| | | | day 21 | | | | | |
| b1091 | USP | None | Health index | −2.5 | NS | 6 | 3 | 3 |

[0473] Table 15F shows that Arabidopsis plants with the USP promoter controlling expression of b1091 (SEQ ID NO:317) were significantly larger than the control plants. Table 15F also shows that the majority of independent transgenic events with the USP promoter and b1091 (SEQ ID NO:317) were larger than the controls. In contrast, plants with the Super promoter controlling expression of b1091 (SEQ ID NO:317) were smaller than controls.

### C. Acetyl-CoA Carboxylase Complex Subunits

[0474] The b0185 gene (SEQ ID NO:319), which encodes an acetyl-CoA carboxylase complex alpha subunit, was expressed in Arabidopsis using an expression cassette that targeted the protein to the mitochondria and was controlled by the USP promoter. Table 16F sets forth biomass and health index data obtained from Arabidopsis plants transformed with these constructs and grown under water-limiting conditions.

TABLE 16F

| | | | | | | | No of | No. of |
|---|---|---|---|---|---|---|---|---|
| | | | | % | | No. of | Positive | Negative |
| Gene | Promoter | Targeting | Measurement | Change | p-Value | Events | Events | Events |
| b0185 | USP | Mit | Biomass at | 8.0 | 0.0306 | 7 | 5 | 2 |
| | | | day 20 | | | | | |
| b0185 | USP | Mit | Biomass at | 2.4 | 0.4640 | 7 | 4 | 3 |
| | | | day 27 | | | | | |
| b0185 | USP | Mit | Health index | 12.1 | 0.0008 | 7 | 5 | 2 |

[0475] Table 16F shows that Arabidopsis plants containing the b0185 gene (SEQ ID NO:319) under control of the USP promoter that were grown under water limiting conditions were significantly larger than control plants that did not express b0185 (SEQ ID NO:319) at day 20. Table 16F shows that the majority of independent transgenic events were larger than the controls, indicating better adaptation to the stress environment. In addition, the transgenic plants were darker green in color than the controls at day 27. This indicates that the plants produced more chlorophyll or had less chlorophyll degradation during stress than the control plants.

[0476] The b3256 gene (SEQ ID NO:321), which encodes a biotin carboxylase subunit of acetyl CoA carboxylase, was expressed in Arabidopsis using an expression cassette that targeted the protein to the mitochondria and was controlled by the USP promoter. Table 17F sets forth biomass and health index data obtained from Arabidopsis plants transformed with these constructs and grown under water-limiting conditions.

TABLE 17F

| | | | | | | | No of | No. of |
|---|---|---|---|---|---|---|---|---|
| | | | | % | | No. of | Positive | Negative |
| Gene | Promoter | Targeting | Measurement | Change | p-Value | Events | Events | Events |
| b3256 | USP | Mit | Biomass at | 12.3 | 0.0012 | 7 | 5 | 2 |
| | | | day 20 | | | | | |
| b3256 | USP | Mit | Biomass at | 8.3 | 0.0080 | 7 | 6 | 1 |
| | | | day 27 | | | | | |
| b3256 | USP | Mit | Health index | 1.2 | NS | 7 | 4 | 3 |

[0477] Table 17F shows that Arabidopsis plants that were grown under water limiting conditions were significantly larger than control plants that did not express the b3256 gene, at two measuring times. Table 17F shows that the majority of independent transgenic events were larger than the controls indicating better adaptation to the stress environment.

[0478] The b3255 gene (SEQ ID NO:329), which encodes a biotin carboxyl carrier protein subunit of acetyl CoA carboxylase, was expressed in Arabidopsis using two expression cassettes: in one cassette, the protein was targeted to the mitochondria and was controlled by the USP promoter. In the second cassette, b3255 (SEQ ID NO:329) was not targeted subcellularly, and was expressed under control of the Super promoter. Table 18F sets forth biomass and health index data obtained from Arabidopsis plants transformed with these constructs and grown under water-limiting conditions.

TABLE 18F

| | | | | | | | No of | No. of |
|---|---|---|---|---|---|---|---|---|
| | | | | % | | No. of | Positive | Negative |
| Gene | Promoter | Targeting | Measurement | Change | p-Value | Events | Events | Events |
| B3255 | Super | None | Biomass at | 8.1 | NS | 6 | 4 | 2 |
| | | | day 20 | | | | | |
| B3255 | Super | None | Biomass at | 6.8 | NS | 6 | 3 | 3 |
| | | | day 27 | | | | | |
| B3255 | Super | None | Health index | 0.3 | NS | 6 | 3 | 3 |
| B3255 | USP | Mit | Biomass at | 25.4 | 0.0000 | 5 | 5 | 0 |
| | | | day 20 | | | | | |
| B3255 | USP | Mit | Biomass at | 7.4 | 0.0759 | 5 | 3 | 2 |
| | | | day 27 | | | | | |
| B3255 | USP | Mit | Health index | 9.1 | 0.0180 | 5 | 4 | 1 |

[0479] Table 18F shows that Arabidopsis plants comprising the b3255 gene (SEQ ID NO:329) under control of the USP promoter that were grown under water limiting conditions were larger than the control plants that did not express the b3255 gene (SEQ ID NO:329), at two measuring times. In addition, the transgenic plants were darker green in color than the controls. This indicates that the plants produced more chlorophyll or had less chlorophyll degradation during stress than the control plants. Table 18F shows that the majority of independent transgenic events were larger than the controls indicating better adaptation to the stress environment.

[0480] Table 18F further shows that when b3255 (SEQ ID NO:329) was expressed in Arabidopsis using an expression cassette that had no subcellular targeting, under control of the Super promoter and grown under water limiting conditions, the resulting Arabidopsis plants were similar in size and health index to the control plants that did not express the b3255 (SEQ ID NO:329), at two measuring times.

[0481] Table 19 sets forth biomass and health index data obtained from Arabidopsis plants transformed with these constructs and grown under well watered conditions. Table 19F shows that Arabidopsis plants expressing b3255 (SEQ ID NO:329) with no subcellular targeting that were grown under well watered conditions were larger than the control plants with the USP promoter but smaller if expression was controlled by the super promoter.

TABLE 19F

| | | | | | | | No of | No. of |
|---|---|---|---|---|---|---|---|---|
| | | | | % | | No. of | Positive | Negative |
| Gene | Promoter | Targeting | Measurement | Change | p-Value | Events | Events | Events |
| B3255 | Super | None | Biomass at | −6.9 | 0.0331 | 6 | 2 | 4 |
| | | | day 17 | | | | | |
| B3255 | Super | None | Biomass at | −6.7 | 0.0145 | 6 | 2 | 4 |
| | | | day 21 | | | | | |
| B3255 | Super | None | Health index | −3.7 | NS | 6 | 2 | 4 |
| B3255 | USP | None | Biomass at | 13.4 | 0.0000 | 6 | 5 | 1 |
| | | | day 17 | | | | | |
| B3255 | USP | None | Biomass at | 6.4 | 0.0040 | 6 | 5 | 1 |
| | | | day 21 | | | | | |
| B3255 | USP | None | Health index | −6.1 | NS | 6 | 2 | 4 |

D. 3-oxoacyl-[acyl-carrier-protein]Synthase II

[0482] The b1095 (SEQ ID NO:335) gene, which encodes a 3-oxoacyl-[acyl-carrier-protein] synthase II, was expressed in Arabidopsis using an expression cassette that targeted the protein to the mitochondria, under control of the USP promoter. Table 20F sets forth biomass and health index data obtained from Arabidopsis plants transformed with this construct and grown under water-limiting conditions.

TABLE 20F

| | | | | | | | No of | No. of |
|---|---|---|---|---|---|---|---|---|
| | | | | % | | No. of | Positive | Negative |
| Gene | Promoter | Targeting | Measurement | Change | p-Value | Events | Events | Events |
| b1095 | USP | Mit | Biomass at | 10.9 | 0.0073 | 7 | 5 | 2 |
| | | | day 20 | | | | | |
| b1095 | USP | Mit | Biomass at | 16.4 | 0.0001 | 7 | 6 | 1 |
| | | | day 27 | | | | | |
| b1095 | USP | Mit | Health index | −4.9 | NS | 7 | 2 | 5 |

[0483] Table 20F shows that Arabidopsis plants that were grown under water limiting conditions were significantly larger than the control plants that did not express b1095 (SEQ ID NO:335) at two measuring times. Table 20F shows that the majority of independent transgenic events were larger than the controls indicating better adaptation to the stress environment.

E. 3-oxoacyl-ACP Reductase

[0484] Gene b1093 (SEQ ID NO:343), which encodes a 3-oxoacyl-ACP reductase, was expressed in Arabidopsis using an expression cassette that targeted the protein to the mitochondria and was controlled by the USP promoter. Table 21F sets forth biomass and health index data obtained from Arabidopsis plants transformed with this construct and grown under water-limitina conditions.

TABLE 21F

| | | | | | | | No of | No. of |
|---|---|---|---|---|---|---|---|---|
| | | | | % | | No. of | Positive | Negative |
| Gene | Promoter | Targeting | Measurement | Change | p-Value | Events | Events | Events |
| b1093 | USP | Mit | Biomass at | 25.1 | 0.0000 | 7 | 6 | 1 |
| | | | day 20 | | | | | |
| b1093 | USP | Mit | Biomass at | 14.4 | 0.0000 | 7 | 6 | 1 |
| | | | day 27 | | | | | |
| b1093 | USP | Mit | Health index | 16.6 | 0.0000 | 7 | 6 | 1 |

[0485] Table 21F shows that Arabidopsis plants containing b1093 (SEQ ID NO:343) targeted to mitochondria under control of the USP promoter and grown under water limiting conditions were significantly larger than the control plants that did not express b1093 (SEQ ID NO:343), at two measuring times. In addition, the transgenic plants were darker green in color than the controls. This indicates that the plants produced more chlorophyll or had less chlorophyll degradation during stress than the control plants. Table 21F shows that six of the seven independent transgenic events were larger than the controls indicating better adaptation to the stress environment.

[0486] The slr0886 gene (SEQ ID NO:345), which also encodes a 3-oxoacyl-ACP reductase, was expressed in Arabidopsis using three different constructs controlled by the PCUbi promoter: the constructs either had no subcellular targeting or they were targetted to the mitochondria or to the chloroplast. Table 22F sets forth biomass and health index data obtained from Arabidopsis plants transformed with these constructs and grown under water-limiting conditions, and Table 23F sets forth biomass and health index data for the untargeted construct under well-watered conditions.

TABLE 22F

| | | | | | | | No of | No. of |
|---|---|---|---|---|---|---|---|---|
| | | | | % | | No. of | Positive | Negative |
| Gene | Promoter | Targeting | Measurement | Change | p-Value | Events | Events | Events |
| slr0886 | PCUbi | None | Biomass at | 38.5 | 0.0000 | 5 | 4 | 1 |
| | | | day 20 | | | | | |
| slr0886 | PCUbi | None | Biomass at | 20.9 | 0.0000 | 5 | 4 | 1 |
| | | | day 27 | | | | | |
| slr0886 | PCUbi | None | Health index | 10.0 | 0.0310 | 5 | 4 | 1 |
| slr0886 | PCUbi | Mit | Biomass at | 15.2 | 0.0014 | 5 | 5 | 0 |
| | | | day 20 | | | | | |
| slr0886 | PCUbi | Mit | Biomass at | 14.3 | 0.0000 | 5 | 4 | 1 |
| | | | day 27 | | | | | |
| slr0886 | PCUbi | Mit | Health index | 7.3 | NS | 5 | 3 | 2 |
| slr0886 | PCUbi | Chlor | Biomass at | 37.8 | 0.0000 | 6 | 6 | 0 |
| | | | day 20 | | | | | |
| slr0886 | PCUbi | Chlor | Biomass at | 11.4 | 0.0048 | 6 | 6 | 0 |
| | | | day 27 | | | | | |
| slr0886 | PCUbi | Chlor | Health index | 17.4 | 0.0000 | 6 | 5 | 1 |

[0487] Table 22F shows that all Arabidopsis plants expressing slr0886 (SEQ ID NO:345) that were grown under water limiting conditions were significantly larger than the control plants that did not express slr0886 (SEQ ID NO:345) at two measuring times. In addition, the transgenic plants were darker green in color than the controls. Table 22F shows that the majority of the independent transgenic events were larger than the controls, indicating better adaptation to the stress environment.

TABLE 23F

| | | | | | | | No of | No. of |
|---|---|---|---|---|---|---|---|---|
| | | | | % | | No. of | Positive | Negative |
| Gene | Promoter | Targeting | Measurement | Change | p-Value | Events | Events | Events |
| slr0886 | PCUbi | None | Biomass at | 20.4 | 0.0000 | 6 | 6 | 0 |
| | | | day 17 | | | | | |
| slr0886 | PCUbi | None | Biomass at | 12.3 | 0.0000 | 6 | 5 | 1 |
| | | | day 21 | | | | | |
| slr0886 | PCUbi | None | Health index | 5.2 | NS | 6 | 6 | 0 |

[0488] Table 23F shows that Arabidopsis plants expressing slr0886 (SEQ ID NO:345) with no subcellular targeting that were grown under well watered conditions were significantly larger than the control plants that did not express slr0886 (SEQ ID NO:345), at two measuring times.

### F. Biotin Synthetase

[0489] The slr1364 gene (SEQ ID NO:397), which encodes a biotin synthetase, was expressed in Arabidopsis using the PCUbi promoter with no subcellular targeting or with subcellular targeting to the mitochondria. Table 24F sets forth biomass and health index data obtained from Arabidopsis plants transformed with these constructs and grown under water-limiting conditions.

TABLE 24F

| | | | | | | | No. of | No. of |
|---|---|---|---|---|---|---|---|---|
| | | | | % | | No. of | Positive | Negative |
| Gene | Promoter | Targeting | Measurement | Change | p-Value | Events | Events | Events |
| slr1364 | PCUbi | None | Biomass at | 0.0 | NS | 5 | 1 | 4 |
| | | | 20 days | | | | | |
| slr1364 | PCUbi | None | Biomass at | −9.2 | 0.0048 | 5 | 1 | 4 |
| | | | 27 days | | | | | |
| slr1364 | PCUbi | None | Health Index | −1.8 | NS | 5 | 2 | 3 |
| slr1364 | PCUbi | Mit | Biomass at | 4.9 | 0.0223 | 6 | 6 | 0 |
| | | | 20 days | | | | | |
| slr1364 | PCUbi | Mit | Biomass at | 2.6 | NS | 6 | 3 | 3 |
| | | | 27 days | | | | | |
| slr1364 | PCUbi | Mit | Health Index | 6.3 | 0.0033 | 6 | 5 | 1 |

[0490] Table 24F shows that Arabidopsis plants that expressed slr1364 (SEQ ID NO:397) using the PCUbi promoter with subcellular targeting to the mitochondria were significantly larger under water limited conditions than the control plants that did not express slr1364 (SEQ ID NO:397) at two measuring times. Arabidopsis plants that expressed slr1364 (SEQ ID NO:397) with no subcellular targeting were smaller under water limited conditions than the control plants.

### Example 5

### Overexpression of Sterol Pathway Genes in Plants

[0491] The polynucleotides of Table 1G were ligated into an expression cassette using known methods. Three different promoters were used to control expression of the transgenes in Arabidopsis: the USP promoter from Vicia faba (SEQ ID NO:451 was used for expression of genes from E. coli or SEQ ID NO:452 was used for expression of genes from S. cerevisiae); the super promoter (SEQ ID NO:453); and the parsley ubiquitin promoter (SEQ ID NO:454). For selective targeting of the polypeptides, the mitochondrial transit peptide from an A. thaliana gene encoding mitochondrial isovaleryl-CoA dehydrogenase designated “Mit” in Tables 6G-9G. SEQ ID NO:456 was used for expression of genes from E. coli or SEQ ID NO:458 was used for expression of genes from S. cerevisiae. In addition, for targeted expression, the chloroplast transit peptide of an Spinacia oleracea gene encoding ferredoxin nitrite reductase designated “Chlor” in Tables 8G-9G (SEQ ID NO:460) was used.

[0492] The Arabidopsis ecotype C24 was transformed with constructs containing the sterol pathway genes described in Example 3 using known methods. Seeds from T2 transformed plants were pooled on the basis of the promoter driving the expression, gene source species and type of targeting (chloroplastic, mitochondrial and cytoplasmic). The seed pools were used in the primary screens for biomass under well watered and water limited growth conditions. Hits from pools in the primary screen were selected, molecular analysis performed and seed collected. The collected seeds were then used for analysis in secondary screens where a larger number of individuals for each transgenic event were analyzed. If plants from a construct were identified in the secondary screen as having increased biomass compared to the controls, it passed to the tertiary screen. In this screen, over 100 plants from all transgenic events for that construct were measured under well watered and drought growth conditions. The data from the transgenic plants were compared to wild type Arabidopsis plants or to plants grown from a pool of randomly selected transgenic Arabidopsis seeds using standard statistical procedures.

[0493] Plants that were grown under well watered conditions were watered to soil saturation twice a week. Images of the transgenic plants were taken at 17 and 21 days using a commercial imaging system. Alternatively, plants were grown under water limited growth conditions by watering to soil saturation infrequently which allowed the soil to dry between watering treatments. In these experiments, water was given on days 0, 8, and 19 after sowing. Images of the transgenic plants were taken at 20 and 27 days using a commercial imaging system.

[0494] Image analysis software was used to compare the images of the transgenic and control plants grown in the same experiment. The images were used to determine the relative size or biomass of the plants as pixels and the color of the plants as the ratio of dark green to total area. The latter ratio, termed the health index, was a measure of the relative amount of chlorophyll in the leaves and therefore the relative amount of leaf senescence or yellowing and was recorded at day 27 only. Variation exists among transgenic plants that contain the various sterol pathway genes, due to different sites of DNA insertion and other factors that impact the level or pattern of gene expression.

[0495] Tables 6G to 9G show the comparison of measurements of the Arabidopsis plants. Percent change indicates the measurement of the transgenic relative to the control plants as a percentage of the control non-transgenic plants; p value is the statistical significance of the difference between transgenic and control plants based on a T-test comparison of all independent events where NS indicates not significant at the 5% level of probabilty; No. of events indicates the total number of independent transgenic events tested in the experiment; No. of positive events indicates the total number of independent transgenic events that were larger than the control in the experiment; No. of negative events indicates the total number of independent transgenic events that were smaller than the control in the experiment. NS indicates not significant at the 5% level of probability.

a. Farnesyl Diphosphate Synthase (FPS)

[0496] The FPS designated B0421 (SEQ ID NO:414) was expressed in Arabidopsis using a construct wherein FPS expression is controlled by the USP promoter and the FPS protein is targeted to mitochondria. Table 6G sets forth biomass and health index data obtained from the Arabidopsis plants transformed with these constructs and tested under water-limiting conditions.

TABLE 6G

| | | | | | | | No of | No. of |
|---|---|---|---|---|---|---|---|---|
| | | | | % | | No. of | Positive | Negative |
| Gene | Promoter | Targeting | Measurement | Change | p-Value | Events | Events | Events |
| B0421 | USP | Mit | Biomass at | 18.8 | 0.0000 | 7 | 7 | 0 |
| | | | day 20 | | | | | |
| B0421 | USP | Mit | Biomass at | 11.4 | 0.0007 | 7 | 6 | 1 |
| | | | day 27 | | | | | |
| B0421 | USP | Mit | Health index | 12.6 | 0.0002 | 7 | 6 | 1 |

[0497] Table 6G shows that Arabidopsis plants expressing B0421 (SEQ ID NO:414) with targeting to mitochondria that were grown under water limiting conditions were significantly larger than the control plants that did not express B0421 (SEQ ID NO:414). In addition, these transgenic plants were darker green in color than the controls. These data indicate that the plants produced more chlorophyll or had less chlorophyll degradation during stress than the control plants. Table 6G also shows that the majority of independent transgenic events were larger than the controls.

[0498] The FPS designated YJL167W (SEQ ID NO:416) was expressed in Arabidopsis using a construct wherein FPS expression is controlled by the USP promoter and the FPS protein is targeted to mitochondria. Table 7G sets forth biomass and health index data obtained from Arabidopsis plants transformed with these constructs and tested under well-watered conditions.

TABLE 7G

| | | | | | | | No. of | No. of |
|---|---|---|---|---|---|---|---|---|
| | | | | % | | No. of | Positive | Negative |
| Gene | Promoter | Targeting | Measurement | Change | p-Value | Events | Events | Events |
| YJL167W | USP | Mit | Biomass at | 16.1 | 0.0000 | 6 | 6 | 0 |
| | | | day 17 | | | | | |
| YJL167W | USP | Mit | Biomass at | 9.7 | 0.0000 | 6 | 6 | 0 |
| | | | day 21 | | | | | |
| YJL167W | USP | Mit | Health index | 14.1 | 0.0095 | 6 | 4 | 2 |

[0499] Table 7G shows that Arabidopsis plants that were grown under well watered conditions were significantly larger than the control plants that did not express YJL167W (SEQ ID NO:416). Table 7G also shows that all independent transgenic events were larger than the controls in the well watered environment.

### B. Squalene Epoxidase

[0500] The YGR175C gene (SEQ ID NO:444), which encodes squalene epoxidase, was expressed in Arabidopsis using three constructs. In one, transcription is controlled by the PCUbi promoter and the protein translated from the resulting transcript is targeted to the chloroplast. Trancription in the other two constructs is controlled by the USP promoter. One of these USP promoter-containing constructs also has a chloroplast targeting sequence in operative association with the gene and the other construct has a mitochondrial targeting sequence in operative association with the gene. Table 8G sets forth biomass and health index data obtained from Arabidopsis plants transformed with these constructs and tested under water-limiting conditions.

TABLE 8G

| | | | | | | | No of | No. of |
|---|---|---|---|---|---|---|---|---|
| | | | | % | | No. of | Positive | Negative |
| Gene | Promoter | Targeting | Measurement | Change | p-Value | Events | Events | Events |
| YGR175C | PCUbi | Chlor | Biomass at | 38.2 | 0.0000 | 12 | 11 | 1 |
| | | | day 20 | | | | | |
| YGR175C | PCUbi | Chlor | Biomass at | 37.6 | 0.0000 | 12 | 12 | 0 |
| | | | day 27 | | | | | |
| YGR175C | PCUbi | Chlor | Health index | 13.9 | 0.0001 | 12 | 11 | 1 |
| YGR175C | USP | Chlor | Biomass at | 28.5 | 0.0000 | 8 | 7 | 1 |
| | | | day 20 | | | | | |
| YGR175C | USP | Chlor | Biomass at | 12.9 | 0.0089 | 8 | 5 | 3 |
| | | | day 27 | | | | | |
| YGR175C | USP | Chlor | Health index | 24.3 | 0.0000 | 8 | 8 | 0 |
| YGR175C | USP | Mit | Biomass at | −5.7 | NS | 6 | 2 | 4 |
| | | | day 20 | | | | | |
| YGR175C | USP | Mit | Biomass at | −8.0 | 0.0480 | 6 | 3 | 3 |
| | | | day 27 | | | | | |
| YGR175C | USP | Mit | Health index | 1.3 | NS | 6 | 5 | 1 |

[0501] Table 8G shows that Arabidopsis plants with the either the USP or PCUbi promoter controlling expression of YGR175C (SEQ ID NO:446) were significantly larger than the control plants when the protein was also targeted to the chloroplast. In addition, these transgenic plants were darker green in color than the controls. These data indicate that the plants produced more chlorophyll or had less chlorophyll degradation during stress than the control plants. Table 8G also shows that the majority of independent transgenic events were larger than the controls. In contrast, no increase in size or green color was observed for transgenic plants with a mitochondrial targeting sequence in operative association with YGR175C (SEQ ID NO:446). These observations suggest that the subcellular localization of the protein is important for conferring increased plant size and darker green color.

[0502] Table 9G sets forth biomass and health index data obtained from Arabidopsis plants transformed with these constructs and tested under well-watered conditions.

TABLE 9G

| | | | | | | | No of | No. of |
|---|---|---|---|---|---|---|---|---|
| | | | | % | | No. of | Positive | Negative |
| Gene | Promoter | Targeting | Measurement | Change | p-Value | Events | Events | Events |
| YGR175C | PCUbi | Chlor | Biomass at | 21.0 | 0.0000 | 10 | 9 | 1 |
| | | | day 17 | | | | | |
| YGR175C | PCUbi | Chlor | Biomass at | 17.7 | 0.0000 | 10 | 9 | 1 |
| | | | day 21 | | | | | |
| YGR175C | PCUbi | Chlor | Health index | 4.0 | NS | 10 | 5 | 5 |
| YGR175C | USP | Chlor | Biomass at | 5.1 | NS | 6 | 3 | 3 |
| | | | day 17 | | | | | |
| YGR175C | USP | Chlor | Biomass at | 3.5 | NS | 6 | 3 | 3 |
| | | | day 21 | | | | | |
| YGR175C | USP | Chlor | Health index | 7.1 | NS | 6 | 4 | 2 |
| YGR175C | USP | Mit | Biomass at | 7.9 | NS | 6 | 4 | 2 |
| | | | day 17 | | | | | |
| YGR175C | USP | Mit | Biomass at | 3.7 | NS | 6 | 4 | 2 |
| | | | day 21 | | | | | |
| YGR175C | USP | Mit | Health index | 3.7 | NS | 6 | 2 | 4 |

[0503] Table 9G shows that Arabidopsis plants grown under well-watered conditions with the either the PCUbi promoter controlling expression of YGR175C (SEQ ID NO:446) were significantly larger than the control plants when the protein was also targeted to the chloroplast. Table 9G also shows that the majority of independent transgenic events were larger than the controls when the PCUbi promoter/chloroplast transit peptide combination was present in the construct used for transformation. In contrast, no increase in size was observed for transgenic plants with the USP promoter controlling transcription of the transgene, when the plants were grown under well-watered conditions. In addition, none of these constructs had a significant effect on the amount of green color of the plants when grown under well-watered conditions. These observations indicate the importance of expression level and subcellular targeting to create the increased growth phenotype under either well watered or water limiting growth conditions.

### Example 6

### Well-Watered Arabidopsis Plants

[0504] The polynucleotides of Table 1 are ligated into a binary vector containing a selectable marker. The resulting recombinant vector contains the corresponding gene in the sense orientation under a constitutive promoter. The recombinant vectors are transformed into an Agrobacterium tumefaciens strain according to standard conditions. A. thaliana ecotype Col-0 or C24 are grown and transformed according to standard conditions. T1 and T2 plants are screened for resistance to the selection agent conferred by the selectable marker gene. T3 seeds are used in greenhouse or growth chamber experiments. Approximately 3-5 days prior to planting, seeds are refrigerated for stratification. Seeds are then planted, fertilizer is applied and humidity is maintained using transparent domes. Plants are grown in a greenhouse at 22 C with photoperiod of 16 hours light/8 hours dark. Plants are watered twice a week.

[0505] At 19 and 22 days, plant area, leaf area, biomass, color distribution, color intensity, and growth rate for each plant are measured using a commercially available imaging system. Biomass is calculated as the total plant leaf area at the last measuring time point. Growth rate is calculated as the plant leaf area at the last measuring time point minus the plant leaf area at the first measuring time point divided by the plant leaf area at the first measuring time point. Health index is calculated as the dark green leaf area divided by the total plant leaf area.

### Example 7

### Water Stress Tolerant Arabidopsis Plants

[0506] The polynucleotides of Table 1 are ligated into a binary vector containing a selectable marker. The resulting recombinant vector contains the corresponding gene in the sense orientation under a constitutive promoter. The recombinant vectors are transformed into an Agrobacterium tumefaciens strain according to standard conditions. A. thaliana ecotype Col-0 or C24 are grown and transformed according to standard conditions. T1 and T2 plants are screened for resistance to the selection agent conferred by the selectable marker gene, and positive plants were transplanted into soil and grown in a growth chamber for 3 weeks. Soil moisture was maintained throughout this time at approximately 50% of the maximum water-holding capacity of soil.

[0507] The total water lost (transpiration) by the plant during this time was measured. After 3 weeks, the entire above-ground plant material was collected, dried at 65 C for 2 days and weighed. The ratio of above-ground plant dry weight (DW) to plant water use is water use efficiency (WUE). Tables 52A through 64A, Tables 25D and 26D, Tables 19E through 24E present WUE and DW for independent transformation events (lines) of transgenic plants overexpressing representative Mitogen activated protein kinase, calcium-dependent protein kinase, cyclin-dependent protein kinase and serine/threonine specific protein kinase polynucleotides of Table 1. Least square means (TR), percent improvement for the line (% Delta), and significant value (p-value) of a line compared to wild-type controls (WT) from an Analysis of Variance are presented. The percent improvement of each transgene-containing line as compared to wild-type control plants for WUE and DW is also presented/calculated.

TABLE 52A
DW analysis of A. thaliana lines overexpressing EST431 (SEQ ID NO: 4)

| Event | WT DW | TR DW | % | |
|---|---|---|---|---|
| ID | mean | mean | Delta | p-value |
| 1 | 0.098 | 0.102 | 4% | 0.8299 |
| 2 | 0.098 | 0.158 | 61% | 0.0053 |
| 3 | 0.098 | 0.094 | −5% | 0.8315 |
| 4 | 0.098 | 0.085 | −13% | 0.5566 |
| 5 | 0.098 | 0.083 | −16% | 0.4913 |
| 6 | 0.098 | 0.104 | 6% | 0.7769 |
| 7 | 0.098 | 0.094 | −5% | 0.806 |
| 8 | 0.098 | 0.107 | 9% | 0.6464 |
| 9 | 0.098 | 0.125 | 27% | 0.1644 |

TABLE 53A
WUE analysis of A. thaliana lines overexpressing EST431
(SEQ ID NO: 4)

| Event | WT WUE | TR WUE | % | |
|---|---|---|---|---|
| ID | mean | mean | Delta | p-value |
| 1 | 1.49 | 1.65 | 11% | 0.4566 |
| 2 | 1.49 | 2.33 | 56% | 0.0005 |
| 3 | 1.49 | 1.38 | −8% | 0.6575 |
| 4 | 1.49 | 1.38 | −7% | 0.6787 |
| 5 | 1.49 | 1.52 | 2% | 0.9083 |
| 6 | 1.49 | 1.67 | 12% | 0.4102 |
| 7 | 1.49 | 1.58 | 6% | 0.671 |
| 8 | 1.49 | 1.65 | 11% | 0.4698 |
| 9 | 1.49 | 1.69 | 13% | 0.3753 |

TABLE 54A
DW analysis of A. thaliana lines overexpressing EST253
(SEQ ID NO: 6)

| Event | WT DW | TR DW | % | |
|---|---|---|---|---|
| ID | mean | mean | Delta | p-value |
| 1 | 0.114 | 0.178 | 56% | 0.0006 |
| 2 | 0.114 | 0.183 | 61% | 0.0002 |
| 3 | 0.114 | 0.186 | 64% | 0.0003 |
| 4 | 0.114 | 0.172 | 50% | 0.0017 |
| 5 | 0.114 | 0.167 | 47% | 0.007 |
| 6 | 0.114 | 0.148 | 30% | 0.0587 |
| 7 | 0.114 | 0.185 | 62% | 0.0004 |
| 8 | 0.114 | 0.160 | 40% | 0.0115 |
| 9 | 0.114 | 0.164 | 44% | 0.0105 |

TABLE 55A
WUE analysis of A. thaliana lines overexpressing EST253
(SEQ ID NO: 6)

| Event | WT WUE | TR WUE | % | |
|---|---|---|---|---|
| ID | mean | mean | Delta | p-value |
| 1 | 1.96 | 2.30 | 17% | 0.0412 |
| 2 | 1.96 | 2.16 | 10% | 0.2303 |
| 3 | 1.96 | 2.32 | 18% | 0.0469 |
| 4 | 1.96 | 2.28 | 16% | 0.0574 |
| 5 | 1.96 | 2.22 | 13% | 0.1446 |
| 6 | 1.96 | 2.04 | 4% | 0.6433 |
| 7 | 1.96 | 2.26 | 15% | 0.0986 |
| 8 | 1.96 | 2.17 | 11% | 0.1991 |
| 9 | 1.96 | 2.02 | 3% | 0.7458 |

TABLE 56A
DW analysis of A. thaliana lines overexpressing EST272
(SEQ ID NO: 30).

| Event | WT DW | TR DW | | |
|---|---|---|---|---|
| ID | mean | mean | % Delta | p-value |
| 1 | 0.1779 | 0.2223 | 25% | 0.0928 |
| 2 | 0.1779 | 0.2608 | 47% | 0.0007 |
| 3 | 0.1779 | 0.284 | 60% | 0.0001 |
| 4 | 0.1779 | 0.2898 | 63% | <0.0001 |
| 5 | 0.1779 | 0.2483 | 40% | 0.0085 |
| 6 | 0.1779 | 0.2518 | 42% | 0.0024 |
| 7 | 0.1779 | 0.1997 | 12% | 0.4674 |
| 8 | 0.1779 | 0.2486 | 40% | 0.0035 |
| 9 | 0.1779 | 0.2422 | 36% | 0.0077 |
| 10 | 0.1779 | 0.255 | 43% | 0.0015 |

TABLE 57A
WUE analysis of A. thaliana lines overexpressing EST272
(SEQ ID NO: 30).

| Event | WT WUE | TR WUE | | |
|---|---|---|---|---|
| ID | mean | mean | % Delta | p-value |
| 1 | 1.8947 | 2.0651 | 9% | 0.3094 |
| 2 | 1.8947 | 2.0777 | 10% | 0.2271 |
| 3 | 1.8947 | 2.253 | 19% | 0.0344 |
| 4 | 1.8947 | 2.1471 | 13% | 0.0971 |
| 5 | 1.8947 | 1.9713 | 4% | 0.6467 |
| 6 | 1.8947 | 1.958 | 3% | 0.6748 |
| 7 | 1.8947 | 1.8884 | 0% | 0.9738 |
| 8 | 1.8947 | 2.0853 | 10% | 0.2086 |
| 9 | 1.8947 | 2.0011 | 6% | 0.4812 |
| 10 | 1.8947 | 2.466 | 30% | 0.0003 |

TABLE 58A
DW analysis of A. thaliana lines overexpressing
EST591 (SEQ ID NO: 62)

| Event | WT DW | TR DW | | |
|---|---|---|---|---|
| ID | mean | mean | % Delta | p-value |
| 1 | 0.114 | 0.0744 | −35% | 0.0272 |
| 11 | 0.114 | 0.128 | 27% | 0.3893 |
| 14 | 0.114 | 0.1552 | 31% | 0.0215 |
| 15 | 0.114 | 0.197 | 71% | 0.0029 |
| 17 | 0.114 | 0.1974 | 31% | <.0001 |
| 2 | 0.114 | 0.1444 | 51% | 0.0875 |
| 3 | 0.114 | 0.1488 | 12% | 0.0511 |
| 5 | 0.114 | 0.1949 | 36% | <.0001 |
| 6 | 0.114 | 0.149 | 73% | 0.0498 |
| 8 | 0.114 | 0.1724 | 73% | 0.0013 |

TABLE 59A
WUE analysis of A. thaliana lines overexpressing
EST591 (SEQ ID NO: 62)

| | | TR | | |
|---|---|---|---|---|
| Event | WT WUE | WUE | | |
| ID | mean | mean | % Delta | p-value |
| 1 | 1.9696 | 1.7367 | −11% | 0.1758 |
| 2 | 1.9696 | 2.0929 | 7% | 0.472 |
| 3 | 1.9696 | 2.4553 | 25% | 0.0055 |
| 5 | 1.9696 | 2.3519 | 20% | 0.0108 |
| 6 | 1.9696 | 2.0568 | 5% | 0.6109 |
| 8 | 1.9696 | 2.124 | 8% | 0.3682 |
| 11 | 1.9696 | 1.8794 | −4% | 0.5673 |
| 14 | 1.9696 | 2.2768 | 16% | 0.0753 |
| 15 | 1.9696 | 2.1498 | 10% | 0.4941 |
| 17 | 1.9696 | 2.1415 | 9% | 0.3167 |

TABLE 60A
DW analysis of A. thaliana lines overexpressing
EST500 (SEQ ID NO: 42)

| Event | WT | TR | % | |
|---|---|---|---|---|
| ID | mean | mean | Delta | p-value |
| 1 | 0.091 | 0.121 | 33% | 0.3656 |
| 2 | 0.091 | 0.131 | 44% | 0.2757 |
| 3 | 0.091 | 0.114 | 26% | 0.4848 |
| 4 | 0.091 | 0.148 | 63% | 0.1002 |
| 5 | 0.091 | 0.152 | 67% | 0.0739 |
| 6 | 0.091 | 0.169 | 86% | 0.025 |
| 7 | 0.091 | 0.150 | 65% | 0.0842 |
| 8 | 0.091 | 0.154 | 70% | 0.0634 |
| 9 | 0.091 | 0.098 | 8% | 0.8416 |
| 10 | 0.091 | 0.113 | 24% | 0.5393 |
| 11 | 0.091 | 0.108 | 18% | 0.7555 |

TABLE 61A
WUE analysis of A. thaliana lines overexpressing
EST500 (SEQ ID NO: 42)

| Event | WT | TR | % | |
|---|---|---|---|---|
| ID | mean | mean | Delta | p-value |
| 1 | 1.92 | 1.82 | −5% | 0.743 |
| 2 | 1.92 | 2.66 | 39% | 0.0261 |
| 3 | 1.92 | 2.42 | 26% | 0.0948 |
| 4 | 1.92 | 2.33 | 21% | 0.1925 |
| 5 | 1.92 | 2.25 | 17% | 0.2665 |
| 6 | 1.92 | 2.27 | 19% | 0.2374 |
| 7 | 1.92 | 2.17 | 13% | 0.4063 |
| 8 | 1.92 | 2.11 | 10% | 0.5302 |
| 9 | 1.92 | 1.71 | −11% | 0.5171 |
| 10 | 1.92 | 1.82 | −5% | 0.7606 |
| 11 | 1.92 | 1.67 | −13% | 0.6203 |

TABLE 62A
DW analysis of A. thaliana lines overexpressing
EST401 (SEQ ID NO: 44)

| Event | WT DW | TR DW | % | |
|---|---|---|---|---|
| ID | mean | mean | Delta | p-value |
| 2 | 0.110 | 0.147 | 33% | 0.007 |
| 3 | 0.110 | 0.156 | 41% | 0.0008 |
| 4 | 0.110 | 0.137 | 24% | 0.0466 |
| 5 | 0.110 | 0.132 | 20% | 0.1048 |
| 6 | 0.110 | 0.137 | 24% | 0.045 |
| 7 | 0.110 | 0.125 | 13% | 0.2645 |
| 8 | 0.110 | 0.117 | 6% | 0.6177 |
| 9 | 0.110 | 0.141 | 28% | 0.0405 |
| 10 | 0.110 | 0.140 | 27% | 0.0272 |
| 11 | 0.110 | 0.124 | 13% | 0.2979 |

TABLE 63A
WUE analysis of A. thaliana lines overexpressing
EST401 (SEQ ID NO: 44)

| Event | WT WUE | TR WUE | % | |
|---|---|---|---|---|
| ID | mean | mean | Delta | p-value |
| 2 | 1.62 | 2.05 | 27% | 0.0439 |
| 3 | 1.62 | 2.06 | 27% | 0.0386 |
| 4 | 1.62 | 2.08 | 29% | 0.0303 |
| 5 | 1.62 | 1.87 | 16% | 0.2362 |
| 6 | 1.62 | 1.92 | 18% | 0.1607 |
| 7 | 1.62 | 2.00 | 23% | 0.078 |
| 8 | 1.62 | 1.88 | 16% | 0.2145 |
| 9 | 1.62 | 2.04 | 26% | 0.0739 |
| 10 | 1.62 | 2.31 | 42% | 0.0014 |
| 11 | 1.62 | 2.19 | 35% | 0.0078 |

TABLE 64A
DW analysis of A. thaliana lines overexpressing
EST336 (SEQ ID NO: 82)

| Event | WT DW | TR DW | | |
|---|---|---|---|---|
| ID | mean | mean | % Delta | p-value |
| 1 | 0.114 | 0.1758 | 54% | 0.0032 |
| 2 | 0.114 | 0.1724 | 51% | 0.0052 |
| 3 | 0.114 | 0.2143 | 88% | <.0001 |
| 4 | 0.114 | 0.1608 | 41% | 0.0145 |
| 5 | 0.114 | 0.1516 | 33% | 0.0684 |
| 6 | 0.114 | 0.1492 | 31% | 0.0876 |
| 7 | 0.114 | 0.1412 | 24% | 0.1855 |
| 8 | 0.114 | 0.15 | 32% | 0.0585 |
| 9 | 0.114 | 0.157 | 38% | 0.0377 |

TABLE 25D
DW analysis of A. thaliana lines overexpressing
EST285 (SEQ ID NO: 208)

| Event | WT DW | TR DW | % | |
|---|---|---|---|---|
| ID | mean | mean | Delta | p-value |
| 1 | 0.110 | 0.103 | −7% | 0.6618 |
| 2 | 0.110 | 0.108 | −3% | 0.8751 |
| 3 | 0.110 | 0.129 | 17% | 0.2879 |
| 4 | 0.110 | 0.161 | 45% | 0.0059 |
| 5 | 0.110 | 0.076 | −32% | 0.0797 |
| 6 | 0.110 | 0.159 | 44% | 0.008 |
| 7 | 0.110 | 0.144 | 31% | 0.059 |
| 8 | 0.110 | 0.110 | −1% | 0.9642 |
| 9 | 0.110 | 0.171 | 55% | 0.0011 |
| 10 | 0.110 | 0.110 | 0% | 0.9838 |

TABLE 26D
WUE analysis of A. thaliana lines overexpressing
EST285 (SEQ ID NO: 208)

| Event | WT WUE | TR WUE | % | |
|---|---|---|---|---|
| ID | mean | mean | Delta | p-value |
| 1 | 1.62 | 1.65 | 2% | 0.8855 |
| 2 | 1.62 | 1.97 | 22% | 0.1046 |
| 3 | 1.62 | 2.27 | 40% | 0.0033 |
| 4 | 1.62 | 1.93 | 19% | 0.1536 |
| 5 | 1.62 | 1.37 | −15% | 0.3083 |
| 6 | 1.62 | 1.94 | 20% | 0.1378 |
| 7 | 1.62 | 1.87 | 16% | 0.2491 |
| 8 | 1.62 | 1.72 | 6% | 0.6425 |
| 9 | 1.62 | 2.11 | 30% | 0.027 |
| 10 | 1.62 | 1.75 | 8% | 0.6 |

TABLE 19E
DW analysis of A. thaliana lines overexpressing
EST314 (SEQ ID NO: 254)

| Event | WT DW | TR DW | | |
|---|---|---|---|---|
| ID | mean | mean | % Delta | p-value |
| 1 | 0.114 | 0.1648 | 45% | 0.0057 |
| 2 | 0.114 | 0.1564 | 37% | 0.0202 |
| 3 | 0.114 | 0.14 | 23% | 0.1502 |
| 4 | 0.114 | 0.157 | 38% | 0.0185 |
| 5 | 0.114 | 0.1422 | 25% | 0.119 |
| 6 | 0.114 | 0.1452 | 27% | 0.0851 |
| 7 | 0.114 | 0.1652 | 45% | 0.0053 |
| 8 | 0.114 | 0.1488 | 31% | 0.0553 |
| 9 | 0.114 | 0.176 | 54% | 0.0008 |
| 11 | 0.114 | 0.1784 | 56% | 0.0005 |

TABLE 20E
WUE analysis A. thaliana lines overexpressing
EST314 (SEQ ID NO: 254).

| Event | WT WUE | TR WUE | | |
|---|---|---|---|---|
| ID | mean | mean | % Delta | p-value |
| 1 | 1.9696 | 2.4723 | 26% | 0.0078 |
| 2 | 1.9696 | 2.2242 | 13% | 0.1718 |
| 3 | 1.9696 | 2.155 | 9% | 0.3185 |
| 4 | 1.9696 | 2.0887 | 6% | 0.5209 |
| 5 | 1.9696 | 1.9933 | 1% | 0.8983 |
| 6 | 1.9696 | 2.2717 | 15% | 0.1056 |
| 7 | 1.9696 | 2.001 | 2% | 0.8656 |
| 8 | 1.9696 | 1.9265 | −2% | 0.816 |
| 9 | 1.9696 | 2.3454 | 19% | 0.0449 |
| 11 | 1.9696 | 2.2909 | 16% | 0.0856 |

TABLE 21E
DW analysis of A. thaliana lines overexpressing
EST322 (SEQ ID NO: 256)

| Event | WT DW | TR DW | | |
|---|---|---|---|---|
| ID | mean | mean | % Delta | p-value |
| 1 | 0.1089 | 0.1355 | 24% | 0.1052 |
| 2 | 0.1089 | 0.0838 | −23% | 0.1568 |
| 3 | 0.1089 | 0.1884 | 73% | <.0001 |
| 4 | 0.1089 | 0.1033 | −5% | 0.8019 |
| 5 | 0.1089 | 0.048 | −56% | 0.0266 |
| 6 | 0.1089 | 0.1788 | 64% | 0.0006 |
| 7 | 0.1089 | 0.1743 | 60% | 0.0001 |
| 8 | 0.1089 | 0.1422 | 31% | 0.0436 |
| 9 | 0.1089 | 0.1518 | 39% | 0.0307 |
| 10 | 0.1089 | 0.147 | 35% | 0.0334 |

TABLE 22E
WUE analysis of A. thaliana lines overexpressing
EST322 (SEQ ID NO: 256)

| Event | WT WUE | TR WUE | | |
|---|---|---|---|---|
| ID | mean | mean | % Delta | p-value |
| 1 | 1.9868 | 1.8144 | −9% | 0.3609 |
| 2 | 1.9868 | 1.5181 | −24% | 0.0239 |
| 3 | 1.9868 | 2.183 | 10% | 0.3381 |
| 4 | 1.9868 | 1.628 | −18% | 0.1674 |
| 5 | 1.9868 | 0.9151 | −54% | 0.0009 |
| 6 | 1.9868 | 2.4043 | 21% | 0.0676 |
| 7 | 1.9868 | 2.2196 | 12% | 0.2183 |
| 8 | 1.9868 | 1.9381 | −2% | 0.7956 |
| 9 | 1.9868 | 1.8251 | −8% | 0.4752 |
| 10 | 1.9868 | 1.7922 | −10% | 0.342 |

TABLE 23E
DW analysis of A. thaliana lines overexpressing
EST589 (SEQ ID NO: 258)

| Event | WT DW | TR DW | | |
|---|---|---|---|---|
| ID | mean | mean | % Delta | p-value |
| 1 | 0.09376 | 0.1122 | 20% | 0.5855 |
| 2 | 0.09376 | 0.0808 | −14% | 0.7064 |
| 3 | 0.09376 | 0.1223 | 30% | 0.4131 |
| 4 | 0.09376 | 0.1011 | 8% | 0.8305 |
| 5 | 0.09376 | 0.1061 | 13% | 0.7196 |
| 6 | 0.09376 | 0.07416 | −21% | 0.5732 |
| 7 | 0.09376 | 0.0911 | −3% | 0.9378 |
| 8 | 0.09376 | 0.1018 | 9% | 0.8147 |
| 9 | 0.09376 | 0.09155 | −2% | 0.9484 |
| 10 | 0.09376 | 0.1457 | 55% | 0.2354 |

TABLE 24E
WUE analysis of A. thaliana lines overexpressing
EST589 (SEQ ID NO: 258)

| Event | WT WUE | TR WUE | | |
|---|---|---|---|---|
| ID | mean | mean | % Delta | p-value |
| 1 | 1.5808 | 1.6999 | 24% | 0.5956 |
| 2 | 1.5808 | 1.4025 | 3% | 0.4551 |
| 3 | 1.5808 | 1.7463 | 28% | 0.4872 |
| 4 | 1.5808 | 1.6957 | 24% | 0.6275 |
| 5 | 1.5808 | 1.5321 | 12% | 0.8363 |
| 6 | 1.5808 | 1.4906 | 9% | 0.7074 |
| 7 | 1.5808 | 1.6152 | 18% | 0.8821 |
| 8 | 1.5808 | 1.6083 | 18% | 0.907 |
| 9 | 1.5808 | 1.5863 | 16% | 0.9811 |
| 10 | 1.5808 | 1.6231 | 19% | 0.8846 |

### Example 8

### Nitrogen Stress Tolerant Arabidopsis Plants

[0508] The polynucleotides of Table 1 are ligated into a binary vector containing a selectable marker. The resulting recombinant vector contains the corresponding gene in the sense orientation under a constitutive promoter. The recombinant vectors are transformed into an A. tumefaciens strain according to standard conditions. A. thaliana ecotype Col-0 or C24 are grown and transformed according to standard conditions. T1 and T2 plants are screened for resistance to the selection agent conferred by the selectable marker gene. Plants are grown in flats using a substrate that contains no organic components. Each flat is wet with water before seedlings resistant to the selection agent are transplanted onto substrate. Plants are grown in a growth chamber set to 22 C with a 55% relative humidity with photoperiod set at 16 h light/8 h dark. A controlled low or high nitrogen nutrient solution is added to waterings on Days 12, 15, 22 and 29. Watering without nutrient solution occurs on Days 18, 25, and 32. Images of all plants in a tray are taken on days 26, 30, and 33 using a commercially available imaging system. At each imaging time point, biomass and plant phenotypes for each plant are measured including plant area, leaf area, biomass, color distribution, color intensity, and growth rate.

### Example 9

### Stress-Tolerant Rapeseed/Canola Plants

[0509] Canola cotyledonary petioles of 4 day-old young seedlings are used as explants for tissue culture and transformed according to EP1566443, the contents of which are hereby incorporated by reference. The commercial cultivar Westar (Agriculture Canada) is the standard variety used for transformation, but other varieties can be used. A. tumefaciens GV3101:pMP90RK containing a binary vector is used for canola transformation. The standard binary vector used for transformation is pSUN (WO02/00900), but many different binary vector systems have been described for plant transformation (e.g. An, G. in Agrobacterium Protocols, Methods in Molecular Biology vol 44, pp 47-62, Gartland K M A and M R Davey eds. Humana Press, Totowa, N.J.). A plant gene expression cassette comprising a selection marker gene, a plant promoter, and a polynucleotide of Table 1 is employed. Various selection marker genes can be used including the mutated acetohydroxy acid synthase (AHAS) gene disclosed in U.S. Pat. Nos. 5,767,366 and 6,225,105. A suitable promoter is used to regulate the trait gene to provide constitutive, developmental, tissue or environmental regulation of gene transcription. Seed is produced from the primary transgenic plants by self-pollination. The second-generation plants are grown in greenhouse conditions and self-pollinated. The plants are analyzed to confirm the presence of T-DNA and to determine the number of T-DNA integrations. Homozygous transgenic, heterozygous transgenic and azygous (null transgenic) plants are compared for their stress tolerance, for example, in the assays described in Examples 6 and 7, and for yield, both in the greenhouse and in field studies.

### Example 10

### Screening for Stress-Tolerant Rice Plants

[0510] Transgenic rice plants comprising a polynucleotide of Table 1 are generated using known methods. Approximately 15 to 20 independent transformants (T0) are generated. The primary transformants are transferred from tissue culture chambers to a greenhouse for growing and harvest of T1 seeds. Five events of the T1 progeny segregated 3:1 for presence/absence of the transgene are retained. For each of these events, 10 T1 seedlings containing the transgene (hetero- and homozygotes), and 10 T1 seedlings lacking the transgene (nullizygotes) are selected by visual marker screening. The selected T1 plants are transferred to a greenhouse. Each plant receives a unique barcode label to link unambiguously the phenotyping data to the corresponding plant. The selected T1 plants are grown on soil in 10 cm diameter pots under the following environmental settings: photoperiod=11.5 h, daylight intensity=30,000 lux or more, daytime temperature=28° C. or higher, night time temperature=22° C., relative humidity=60-70%. Transgenic plants and the corresponding nullizygotes are grown side-by-side at random positions. From the stage of sowing until the stage of maturity, the plants are passed several times through a digital imaging cabinet. At each time point digital, images (2048×1536 pixels, 16 million colours) of each plant are taken from at least 6 different angles.

[0511] The data obtained in the first experiment with T1 plants are confirmed in a second experiment with T2 plants. Lines that have the correct expression pattern are selected for further analysis. Seed batches from the positive plants (both hetero- and homozygotes) in T1 are screened by monitoring marker expression. For each chosen event, the heterozygote seed batches are then retained for T2 evaluation. Within each seed batch, an equal number of positive and negative plants are grown in the greenhouse for evaluation.

[0512] Transgenic plants are screened for their improved growth and/or yield and/or stress tolerance, for example, using the assays described in Examples 6 and 7, and for yield, both in the greenhouse and in field studies.

### Example 11

### Stress-Tolerant Soybean Plants

[0513] The polynucleotides of Table 1 are transformed into soybean using the methods described in commonly owned copending international application number WO 2005/121345, the contents of which are incorporated herein by reference.

[0514] The transgenic plants generated are then screened for their improved growth under water-limited conditions and/or drought, salt, and/or cold tolerance, for example, using the assays described in Examples 6 and 7, and for yield, both in the greenhouse and in field studies.

### Example 12

### Stress-Tolerant Wheat Plants

[0515] The polynucleotides of Table 1 are transformed into wheat using the method described by Ishida et al., 1996, Nature Biotech. 14745-50. Immature embryos are co-cultivated with Agrobacterium tumefaciens that carry “super binary” vectors, and transgenic plants are recovered through organogenesis. This procedure provides a transformation efficiency between 2.5% and 20%. The transgenic plants are then screened for their improved growth and/or yield under water-limited conditions and/or stress tolerance, for example, is the assays described in Examples 6 and 7, and for yield, both in the greenhouse and in field studies.

### Example 13

### Stress-Tolerant Corn Plants

[0516] The polynucleotides of Table 1 are transformed into immature embryos of corn using Agrobacterium. After imbibition, embryos are transferred to medium without selection agent. Seven to ten days later, embryos are transferred to medium containing selection agent and grown for 4 weeks (two 2-week transfers) to obtain transformed callus cells. Plant regeneration is initiated by transferring resistant calli to medium supplemented with selection agent and grown under light at 25-27° C. for two to three weeks. Regenerated shoots are then transferred to rooting box with medium containing selection agent. Plantlets with roots are transferred to potting mixture in small pots in the greenhouse and after acclimatization are then transplanted to larger pots and maintained in greenhouse till maturity.

[0517] Using assays such as the assay described in Examples 6 and 7, each of these plants is uniquely labeled, sampled and analyzed for transgene copy number. Transgene positive and negative plants are marked and paired with similar sizes for transplanting together to large pots. This provides a uniform and competitive environment for the transgene positive and negative plants. The large pots are watered to a certain percentage of the field water capacity of the soil depending the severity of water-stress desired. The soil water level is maintained by watering every other day. Plant growth and physiology traits such as height, stem diameter, leaf rolling, plant wilting, leaf extension rate, leaf water status, chlorophyll content and photosynthesis rate are measured during the growth period. After a period of growth, the above ground portion of the plants is harvested, and the fresh weight and dry weight of each plant are taken. A comparison of the drought tolerance phenotype between the transgene positive and negative plants is then made.

[0518] Using assays such as the assay described in Example 6 and 7, the pots are covered with caps that permit the seedlings to grow through but minimize water loss. Each pot is weighed periodically and water added to maintain the initial water content. At the end of the experiment, the fresh and dry weight of each plant is measured, the water consumed by each plant is calculated and WUE of each plant is computed. Plant growth and physiology traits such as WUE, height, stem diameter, leaf rolling, plant wilting, leaf extension rate, leaf water status, chlorophyll content and photosynthesis rate are measured during the experiment. A comparison of WUE phenotype between the transgene positive and negative plants is then made.

[0519] Using assays such as the assay described in Example 6 and 7, these pots are kept in an area in the greenhouse that has uniform environmental conditions, and cultivated optimally. Each of these plants is uniquely labeled, sampled and analyzed for transgene copy number. The plants are allowed to grow under theses conditions until they reach a predefined growth stage. Water is then withheld. Plant growth and physiology traits such as height, stem diameter, leaf rolling, plant wilting, leaf extension rate, leaf water status, chlorophyll content and photosynthesis rate are measured as stress intensity increases. A comparison of the dessication tolerance phenotype between transgene positive and negative plants is then made.

[0520] Segregating transgenic corn seeds for a transformation event are planted in small pots for testing in a cycling drought assay. These pots are kept in an area in the greenhouse that has uniform environmental conditions, and cultivated optimally. Each of these plants is uniquely labeled, sampled and analyzed for transgene copy number. The plants are allowed to grow under theses conditions until they reach a predefined growth stage. Plants are then repeatedly watered to saturation at a fixed interval of time. This water/drought cycle is repeated for the duration of the experiment. Plant growth and physiology traits such as height, stem diameter, leaf rolling, leaf extension rate, leaf water status, chlorophyll content and photosynthesis rate are measured during the growth period. At the end of the experiment, the plants are harvested for above-ground fresh and dry weight. A comparison of the cycling drought tolerance phenotype between transgene positive and negative plants is then made.

[0521] In order to test segregating transgenic corn for drought tolerance under rain-free conditions, managed-drought stress at a single location or multiple locations is used. Crop water availability is controlled by drip tape or overhead irrigation at a location which has less than 10 cm rainfall and minimum temperatures greater than 5° C. expected during an average 5 month season, or a location with expected in-season precipitation intercepted by an automated “rain-out shelter” which retracts to provide open field conditions when not required. Standard agronomic practices in the area are followed for soil preparation, planting, fertilization and pest control. Each plot is sown with seed segregating for the presence of a single transgenic insertion event. A Taqman transgene copy number assay is used on leaf samples to differentiate the transgenics from null-segregant control plants. Plants that have been genotyped in this manner are also scored for a range of phenotypes related to drought-tolerance, growth and yield. These phenotypes include plant height, grain weight per plant, grain number per plant, ear number per plant, above ground dry-weight, leaf conductance to water vapor, leaf CO₂ uptake, leaf chlorophyll content, photosynthesis-related chlorophyll fluorescence parameters, water use efficiency, leaf water potential, leaf relative water content, stem sap flow rate, stem hydraulic conductivity, leaf temperature, leaf reflectance, leaf light absorptance, leaf area, days to flowering, anthesis-silking interval, duration of grain fill, osmotic potential, osmotic adjustment, root size, leaf extension rate, leaf angle, leaf rolling and survival. All measurements are made with commercially available instrumentation for field physiology, using the standard protocols provided by the manufacturers. Individual plants are used as the replicate unit per event.

[0522] In order to test non-segregating transgenic corn for drought tolerance under rain-free conditions, managed-drought stress at a single location or multiple locations is used. Crop water availability is controlled by drip tape or overhead irrigation at a location which has less than 10 cm rainfall and minimum temperatures greater than 5° C. expected during an average 5 month season, or a location with expected in-season precipitation intercepted by an automated “rain-out shelter” which retracts to provide open field conditions when not required. Standard agronomic practices in the area are followed for soil preparation, planting, fertilization and pest control. Trial layout is designed to pair a plot containing a non-segregating transgenic event with an adjacent plot of null-segregant controls. A null segregant is progeny (or lines derived from the progeny) of a transgenic plant that does not contain the transgene due to Mendelian segregation. Additional replicated paired plots for a particular event are distributed around the trial. A range of phenotypes related to drought-tolerance, growth and yield are scored in the paired plots and estimated at the plot level. When the measurement technique could only be applied to individual plants, these are selected at random each time from within the plot. These phenotypes include plant height, grain weight per plant, grain number per plant, ear number per plant, above ground dry-weight, leaf conductance to water vapor, leaf CO₂ uptake, leaf chlorophyll content, photosynthesis-related chlorophyll fluorescence parameters, water use efficiency, leaf water potential, leaf relative water content, stem sap flow rate, stem hydraulic conductivity, leaf temperature, leaf reflectance, leaf light absorptance, leaf area, days to flowering, anthesis-silking interval, duration of grain fill, osmotic potential, osmotic adjustment, root size, leaf extension rate, leaf angle, leaf rolling and survival. All measurements are made with commercially available instrumentation for field physiology, using the standard protocols provided by the manufacturers. Individual plots are used as the replicate unit per event.

[0523] To perform multi-location testing of transgenic corn for drought tolerance and yield, five to twenty locations encompassing major corn growing regions are selected. These are widely distributed to provide a range of expected crop water availabilities based on average temperature, humidity, precipitation and soil type. Crop water availability is not modified beyond standard agronomic practices. Trial layout is designed to pair a plot containing a non-segregating transgenic event with an adjacent plot of null-segregant controls. A range of phenotypes related to drought-tolerance, growth and yield are scored in the paired plots and estimated at the plot level. When the measurement technique could only be applied to individual plants, these are selected at random each time from within the plot. These phenotypes included plant height, grain weight per plant, grain number per plant, ear number per plant, above ground dry-weight, leaf conductance to water vapor, leaf CO₂ uptake, leaf chlorophyll content, photosynthesis-related chlorophyll fluorescence parameters, water use efficiency, leaf water potential, leaf relative water content, stem sap flow rate, stem hydraulic conductivity, leaf temperature, leaf reflectance, leaf light absorptance, leaf area, days to flowering, anthesis-silking interval, duration of grain fill, osmotic potential, osmotic adjustment, root size, leaf extension rate, leaf angle, leaf rolling and survival. All measurements are made with commercially available instrumentation for field physiology, using the standard protocols provided by the manufacturers. Individual plots are used as the replicate unit per event.

### BRIEF DESCRIPTION OF THE DRAWINGS

[0524] FIG. 1 shows an alignment of the disclosed amino acid sequences of mitogen activated protein kinases GM471-43343 (SEQ ID NO:2), EST431 (SEQ ID NO:4), and EST253 (SEQ ID NO:6), TA54298452 (SEQ ID NO:8), GM59742369 (SEQ ID NO:10), LU61585372 (SEQ ID NO:12), BN44703759 (SEQ ID NO:14), GM59703946 (SEQ ID NO:16), GM59589775 (SEQ ID NO:18), LU61696985 (SEQ ID NO:20), ZM62001130 (SEQ ID NO:22), HA66796355 (SEQ ID NO:24), LU61684898 (SEQ ID NO:26), LU61597381 (SEQ ID NO:28), EST272 (SEQ ID NO:30), BN42920374 (SEQ ID NO:32), BN45700248 (SEQ ID NO:34), BN47678601 (SEQ ID NO:36), and GMsj02a06 (SEQ ID NO:38). The alignment was generated using Align X of Vector NTI.

[0525] FIG. 2 shows an alignment of the disclosed amino acid sequences of calcium-dependent protein kinases GM50305602 (SEQ ID NO:40), EST500 (SEQ ID NO:42), and EST401 (SEQ ID NO:44), BN51391539 (SEQ ID NO:46), GM59762784 (SEQ ID NO:48), BN44099508 (SEQ ID NO:50), BN45789913 (SEQ ID NO:52), BN47959187 (SEQ ID NO:54), BN51418316 (SEQ ID NO:56), GM59691587 (SEQ ID NO:58), ZM62219224 (SEQ ID NO:60), EST591 (SEQ ID NO:62), BN51345938 (SEQ ID NO:64), BN51456960 (SEQ ID NO:66), BN43562070 (SEQ ID NO:68), TA60004809 (SEQ ID NO:70), ZM62079719 (SEQ ID NO:72). The alignment was generated using Align X of Vector NTI.

[0526] FIG. 3 shows an alignment of the disclosed amino acid sequences of cyclin-dependent protein kinases BN42110642 (SEQ ID NO:74), GM59794180 (SEQ ID NO:76), GMsp52b07 (SEQ ID NO:78), and ZM57272608 (SEQ ID NO:80). The alignment was generated using Align X of Vector NTI.

[0527] FIG. 4 shows an alignment of the disclosed amino acid sequences of serine/threonine specific protein kinases EST336 (SEQ ID NO:82), BN43012559 (SEQ ID NO:84), BN44705066 (SEQ ID NO:86), GM50962576 (SEQ ID NO:88), GMsk93h09 (SEQ ID NO:90), GMso31a02 (SEQ ID NO:92), LU61649369 (SEQ ID NO:94), LU61704197 (SEQ ID NO:96), ZM57508275 (SEQ ID NO:98), and ZM59288476 (SEQ ID NO:100). The alignment was generated using Align X of Vector NTI.

[0528] FIG. 5 shows an alignment of the disclosed amino acid sequences BN42194524 (SEQ ID NO:102), ZM68498581 (SEQ ID NO:104), BN42062606 (SEQ ID NO:106), BN42261838 (SEQ ID NO:108), BN43722096 (SEQ ID NO:110), GM50585691 (SEQ ID NO:112), GMsa56c07 (SEQ ID NO:114), GMsb20d04 (SEQ ID NO:116), GMsg04a02 (SEQ ID NO:118), GMsp36c10 (SEQ ID NO:120), GMsp82f11 (SEQ ID NO:122), GMss66f03 (SEQ ID NO:124), LU61748885 (SEQ ID NO:126), 0S36582281 (SEQ ID NO:128), 0S40057356 (SEQ ID NO:130), ZM57588094 (SEQ ID NO:132), ZM67281604 (SEQ ID NO:134), and ZM68466470 (SEQ ID NO:136). The alignment was generated using Align X of Vector NTI

[0529] FIG. 6 shows an alignment of the disclosed amino acid sequences BN45660154_{—}5 (SEQ ID NO:138), BN45660154_{—}8 (SEQ ID NO:140), and ZM58885021 (SEQ ID NO:142), and BN46929759 (SEQ ID NO:144). The alignment was generated using Align X of Vector NTI.

[0530] FIG. 7 shows an alignment of the disclosed amino acid sequences BN43100775 (SEQ ID NO:146), GM59673822 (SEQ ID NO:148), and ZM59314493 (SEQ ID NO:150). The alignment was generated using Align X of Vector NTI.

[0531] FIG. 8 shows an alignment of the disclosed amino acid sequences At5G60750 (SEQ ID NO:158), BN47819599 (SEQ ID NO:160), and ZM65102675 (SEQ ID NO:162). The alignment was generated using Align X of Vector NTI.

[0532] FIG. 9 shows an alignment of the disclosed amino acid sequences BN51278543 (SEQ ID NO:164), GM59587627 (SEQ ID NO:166), GMsae76c10 (SEQ ID NO:168), ZM68403475 (SEQ ID NO:170), and ZMTD14006355 (SEQ ID NO:172). The alignment was generated using Align X of Vector NTI.

[0533] FIG. 10 shows an alignment of the disclosed amino acid sequences BN48622391 (SEQ ID NO:176), GM50247805 (SEQ ID NO:178), and ZM62208861 (SEQ ID NO:180). The alignment was generated using Align X of Vector NTI.

[0534] FIG. 11 shows an alignment of the disclosed amino acid sequences GM49819537 (SEQ ID NO:182), BN42562310 (SEQ ID NO:184), GM47121078 (SEQ ID NO:186), and GMsf89h03 (SEQ ID NO:188). The alignment was generated using Align X of Vector NTI.

[0535] FIG. 12 shows an alignment of the disclosed amino acid sequences HA66670700 (SEQ ID NO:190), GM50390979 (SEQ ID NO:192), GM59720014 (SEQ ID NO:194), GMsab62c11 (SEQ ID NO:196), GMs142e03 (SEQ ID NO:198), and GMss72c01 (SEQ ID NO:200). The alignment was generated using Align X of Vector NTI.

[0536] FIG. 13 shows an alignment of the disclosed amino acid sequences ZM62043790 (SEQ ID NO:154), GMsk21g122 (SEQ ID NO:156), and GMsk21ga12 (SEQ ID NO:152). The alignment was generated using Align X of Vector NTI.

[0537] FIG. 14 shows an alignment of the disclosed amino acid sequences EST285 (SEQ ID NO:208), BN42471769 (SEQ ID NO:210), and ZM100324 (SEQ ID NO:212), BN42817730 (SEQ ID NO:214), BN45236208 (SEQ ID NO:216), BN46730374 (SEQ ID NO:218), BN46832560 (SEQ ID NO:220), BN46868821 (SEQ ID NO:222), GM48927342 (SEQ ID NO:224), GM48955695 (SEQ ID NO:226), GM48958569 (SEQ ID NO:228), GM50526381 (SEQ ID NO:230), HA66511283 (SEQ ID NO:232), HA66563970 (SEQ ID NO:234), HA66692703 (SEQ ID NO:236), HA66822928 (SEQ ID NO:238), LU61569679 (SEQ ID NO:240), LU61703351 (SEQ ID NO:242), LU61962194 (SEQ ID NO:244), TA54564073 (SEQ ID NO:246), TA54788773 (SEQ ID NO:248), TA56412836 (SEQ ID NO:250), and ZM65144673 (SEQ ID NO:252). The alignment was generated using Align X of Vector NTI

[0538] FIG. 15 shows an alignment of the disclosed amino acid sequences EST589 (SEQ ID NO:258), BN45899621 (SEQ ID NO:260), BN51334240 (SEQ ID NO:262), BN51345476 (SEQ ID NO:264), BN42856089 (SEQ ID NO:266), BN43206527 (SEQ ID NO:268), GMsf85h09 (SEQ ID NO:270), GMsj98e01 (SEQ ID NO:272), GMsu65h07 (SEQ ID NO:274), HA66777473 (SEQ ID NO:276), LU61781371 (SEQ ID NO:278), LU61589678 (SEQ ID NO:280), LU61857781 (SEQ ID NO:282), TA55079288 (SEQ ID NO:284), ZM59400933 (SEQ ID NO:286). The alignment was generated using Align X of Vector NTI.

[0539] FIG. 16 shows a flow diagram of acetyl-CoA metabolism and fatty acid biosynthesis with relation to the gene products that modify yield.

[0540] FIG. 17 shows an alignment of the amino acid sequences of the acyl-CoA synthetase long-chain-fatty-acid-CoA ligase subunits designated b1805 (SEQ ID NO:288), YER015W (SEQ ID NO:290), GM59544909 (SEQ ID NO:292), GM59627238 (SEQ ID NO:294), GM59727707 (SEQ ID NO:296), ZM57432637 (SEQ ID NO:298), ZM58913368 (SEQ ID NO:300), ZM62001931 (SEQ ID NO:302), ZM65438309 (SEQ ID NO:304), GM59610424 (SEQ ID NO:306), GM59661358 (SEQ ID NO:308), GMst55d11 (SEQ ID NO:310), ZM65362798 (SEQ ID NO:312), ZM62261160 (SEQ ID NO:314), and ZM62152441 (SEQ ID NO:316). The alignment was generated using Align X of Vector NTI.

[0541] FIG. 18 shows an alignment of the amino acid sequences of the biotin carboxylase subunits of acetyl CoA carboxylase designated b3256 (SEQ ID NO:322), BN49370246 (SEQ ID NO:324), GM59606041 (SEQ ID NO:326), GM59537012 (SEQ ID NO:328). The alignment was generated using Align X of Vector NTI.

[0542] FIG. 19 shows an alignment of the amino acid sequences of the acetyl-CoA carboxylase biotin carboxyl carrier protein subunits designated b3255 (SEQ ID NO:330), BN493-42080 (SEQ ID NO:332), BN45576739 (SEQ ID NO:334). The alignment was generated using Align X of Vector NTI.

[0543] FIG. 20 shows an alignment of the amino acid sequences b1095 (SEQ ID NO:336), GM48933354 (SEQ ID NO:338), ZM59397765 (SEQ ID NO:340), GM59563409 (SEQ ID NO:342). The alignment was generated using Align X of Vector NTI.

[0544] FIG. 21 shows an alignment of the disclosed amino acid sequences B1093 (SEQ ID NO:344), slr0886 (SEQ ID NO:346), BN44033445 (SEQ ID NO:348), BN43251017 (SEQ ID NO:350), BN42133443 (SEQ ID NO:352), GM49771427 (SEQ ID NO:354), GM48925912 (SEQ ID NO:356), GM51007060 (SEQ ID NO:358), GM59598120 (SEQ ID NO:360), GM59619826 (SEQ ID NO:362), GMsaa65f11 (SEQ ID NO:364), GMsf29g01 (SEQ ID NO:366), GMsn33h01 (SEQ ID NO:368), GMsp73h12 (SEQ ID NO:370), GMst67g06 (SEQ ID NO:372), GMsu14e09 (SEQ ID NO:374), GMsu65c05 (SEQ ID NO:376), HV62626732 (SEQ ID NO:378), LU61764715 (SEQ ID NO:380), 0S32620492 (SEQ ID NO:382), ZM57377353 (SEQ ID NO:384), ZM58204125 (SEQ ID NO:386), ZM58594846 (SEQ ID NO:388), ZM62192824 (SEQ ID NO:390), ZM65173545 (SEQ ID NO:392), ZM65173829 (SEQ ID NO:394), ZM57603160 (SEQ ID NO:396). The alignment was generated using Align X of Vector NTI.

[0545] FIG. 22 shows an alignment of the biotin synthetase amino acid sequences slr1364 (SEQ ID NO:398), BN51403883 (SEQ ID NO:400), ZM65220870 (SEQ ID NO:402). The alignment was generated using Align X of Vector NTI.

[0546] FIG. 23 shows a flow diagram of phytosterol metabolism as it relates to the present invention.

[0547] FIG. 24 shows an alignment of the amino acid sequences of the farnesyl diphosphate synthases designated B0421 (SEQ ID NO:414), YJL167W (SEQ ID NO:416), BN42777400 (SEQ ID NO:418), BN43165280 (SEQ ID NO:420), GMsf33b12 (SEQ ID NO:422), GMsa58c11 (SEQ ID NO:424), GM48958315 (SEQ ID NO:426), TA55347042 (SEQ ID NO:428), TA59981866 (SEQ ID NO:430), ZM68702208 (SEQ ID NO:432), ZM62161138 (SEQ ID NO:434). The alignment was generated using Align X of Vector NTI.

[0548] FIG. 25 shows an alignment of the amino acid sequences of the squalene synthases designated SQS1 (SEQ ID NO:436), SQS2 (SEQ ID NO:438), BN51386398 (SEQ ID NO:440), GM59738015 SEQ ID NO:442), ZM68433599 (SEQ ID NO:444), A9RRG4 (SEQ ID NO:463), O22107 (SEQ ID NO:464), Q84LE3 (SEQ ID NO:465), O22106 (SEQ ID NO:466), Q6Z368 (SEQ ID NO:467), YHR190W (SEQ ID NO:468). The alignment was generated using Align X of Vector NTI.

[0549] FIG. 26 shows an alignment of the amino acid sequences of the squalene epoxidases designated YGR175C (SEQ ID NO:446), BN48837983 (SEQ ID NO:448), ZM62269276 (SEQ ID NO:450). The alignment was generated using Align X of Vector NTI.

The application's sequence listing, which the Patent Office published only in electronic form, follows.

SEQUENCE LISTING (468 sequences)

SEQ ID NO: 1 - DNA, 1107 bp, Glycine max
atggctactttagttgaaccccccaacagaattaagcctaaggggaagcattattatacaatatggcaaacattgtttgagattgatacgaagtacgttccaatcaagcctataggccgaggagcatatggcgtggtgtgctcttccatcaacagggagaccaatgagaaagttgcaattaagaagattggtaatatatttgagaattctattgatgcattgagaactttaagggagctgaagctgcttagacatattcggcacgagaatgtcattgctttgaaagatgttatgatgccaatccacagaacaagttttaaagatgtctacttggtctacgagctcatggatacagatcttcatcaaattattaagtcctctcaaccactttccaatgatcattgcaaatatttcttgtttcagctccttcgaggtctaaaatatcttcattcagcaaacattcttcaccgggacttgaagcctgggaatctgctcgtcaatgccaattgcgatttgaagatatgtgactttgggcttgcacgaactaatggagttgatggccagtttatgacagagtatgttgtcactcgctggtatcgtgcaccggagctcttgttatgctgtgacaattatggaacctctattgatgtctggtcagtagggtgcatttttgctgagattcttggtagaaagccaatcttccctggaactgaatgtctcaaccagctgaaactaattataagcgttcttggaagccagcatgaatctcatattgagtttattgacaatgcaaaagccaggagatttatcaaatcactgccctgtactagaggcagacacttctctcagctatacccacaagcagatccattagccatagatttgttgcaaaaaatgcttgtgtttgatccaaccaagagaattactgtcttggaagctctccaacacccgtatatggctggcctatatgatccaaggtgcaaccctcctgctcaggttcccatcagtcttgacatagatgaacattggggagaaccgatgattagggaaatgatgtggaatgagatgctacattatcatcctgaagctgcttctaccaatgcatag

SEQ ID NO: 2 - protein, 368 aa, Glycine max
MATLVEPPNRIKPKGKHYYTIWQTLFEIDTKYVPIKPIGRGAYGVVCSSINRETNEKVAIKKIGNIFENSIDALRTLRELKLLRHIRHENVIALKDVMMPIHRTSFKDVYLVYELMDTDLHQIIKSSQPLSNDHCKYFLFQLLRGLKYLHSANILHRDLKPGNLLVNANCDLKICDFGLARTNGVDGQFMTEYVVTRWYRAPELLLCCDNYGTSIDVWSVGCIFAEILGRKPIFPGTECLNQLKLIISVLGSQHESHIEFIDNAKARRFIKSLPCTRGRHFSQLYPQADPLAIDLLQKMLVFDPTKRITVLEALQHPYMAGLYDPRCNPPAQVPISLDIDEHWGEPMIREMMWNEMLHYHPEAASTNA

SEQ ID NO: 3 - DNA, 1522 bp, Physcomitrella patens
aacgcttggtgacggagatttgcagcgacgggtggaaggggagaaaagggtttgtgagtcggcgaggtagagagacagagagagagggcgcggtgccggagttatggacgttgcaggcgcaggtgggggaggggccgcggacgggaacatacaaggagtgcccacgcacaacggcgagtacacgcagtacaacatcttcggcaacttgtttgaggtgtctaggaagtatgtgccgcccattcgccccatcggccgaggcgcctacggcattgtgtgttccgctgtgaattctgaaacgggagaggaggtggccatcaagaagatcggtaacgcgttcgacaacaggattgatgcaaagcgcactctgcgagaaattaagctactgcggcacatggatcacgagaacattgtggcgattcgcgacatcattagacctcccacccgggaaaacttcaacgacgtgtacattgtatatgagctgatggacacggatcttcaccagatcattcgtagcaatcagccgctgacagaggaccactgccagtactttttgtaccagctacttcgtgggctcaagtacattcactcggcgaaagttcttcaccgtgatttaaagccgagcaatttgcttctgaatgcaaattgtgacctcaaaatttgtgacttcggtttagctcgaacaacctcagagactgatttcatgacggagtacgttgtgactcgctggtacagggccccagagcttttactaaactgctccgagtacaccgcagccattgacgtgtggtcggtaggctgcatattcatggaacttttgaacagagagcccttattcccggggagggattacgtccaacagttgcgcctcatcacagagctaattgggtcccctgaggaccacgacctggggttcttgaggagcgataacgcgagacgttacataagacagttgcctcgattcgccagacagcccttagataggaagtttcccaatatggggcctgctgcgattgatctagtggagcacatgctacggttcgaccctgcgcgtcgtatcacagtggaggaggctttggcgcacccatacctcgcgacgctgcacgatataaacgatgaaccgatctgccatagtcctttcgagttcgattttgagcagccatcgttcacagaggagcacatcaaggagcttatcatgatggaagcgatagccttcaaccctgggaatgtgggtgacatgatgtcctagtggattcttgtggtacttctcctttgagagctgttgcgatcggcgccagtaatctgctgagcaaaagccatggctctgttgtgtgggtaaagagagcagtacaaggagtcgtgttgggcttgtccaaccctccctccttgtgccagtgcatcgctccattcctctgtcggttcttccccattttgagcggcatgcatgatcctagggtggtttttatctgggagaccaacattgatcgagagcactagcatacctccactcaacatcggcgagctc

SEQ ID NO: 4 - protein, 380 aa, Physcomitrella patens
MDVAGAGGGGAADGNIQGVPTHNGEYTQYNIFGNLFEVSRKYVPPIRPIGRGAYGIVCSAVNSETGEEVAIKKIGNAFDNRIDAKRTLREIKLLRHMDHENIVAIRDIIRPPTRENFNDVYIVYELMDTDLHQIIRSNQPLTEDHCQYFLYQLLRGLKYIHSAKVLHRDLKPSNLLLNANCDLKICDFGLARTTSETDFMTEYVVTRWYRAPELLLNCSEYTAAIDVWSVGCIFMELLNREPLFPGRDYVQQLRLITELIGSPEDHDLGFLRSDNARRYIRQLPRFARQPLDRKFPNMGPAAIDLVEHMLRFDPARRITVEEALAHPYLATLHDINDEPICHSPFEFDFEQPSFTEEHIKELIMMEAIAFNPGNVGDMMS

SEQ ID NO: 5 - DNA, 1526 bp, Physcomitrella patens
gacttcttagatgccgccatttagaggtagaaatgataagaatgtcggaagccgcaatcaggtgagttgagtggatggagcatgatagcatacctgagggtgcgaacagaggaagagctaatcggcgaggtggtgtgaatcaagaaggctatggtggacgtaagaatcgagccagatggggaagggggttgggcttgtcaaaatcttgtaggggtttcaaggacggacatagttgattgaagctgttttgatcgaggatggctactaaagttgaggttcctgagggcacatgcccgcctggtaaacatcactacatgctgtggcgaagcgtattcgagattgatacgaagtatgcccctatcaagccgattggaaaaggggcttacggagtggtttgctccgcaaagaataacgaaacaggggatcgagtggctatcaagaagattacaaatgcatttgagaataccacagacgcccggcggacattgcgcgaaattcgtctgctgcgtcatttgtttcacgagaacataattgccgtgaaggatatcatgaagccagttggtcgtcaaactttcaacgatgtgtatattgtgtatgagctcatggacaccgaccttcatcaaattatacggtcttcacagacccttacagatgaccattgccagtactttatttatcagttgttgcgcggtcttaaatacgttcattctgccaatgttctacaccgcgatctgaagccaagtaatctgctactcaatgcgagctgcgacttgaagatttgcgacttcggattggcgcggacagggagtgacaaaggccaattcatgaccgagtacgtcgtgacaaggtggtacagagccccggagcttctcctgtcgtgcgatgagtatacgagcgctatagacatgtggtcagttggctgcatatttgcggagcttttagggcggaaacctttatttccaggcaaggattatatccatcagctcaagctgataataagcatcatcggatctccggacgagaccgatctgcatttcatccaaagccagaaggcgaggagctacatccgatcccttccgttcacgcctcgcgtctctcttgctcgtctctatcctcgcgcaaatcccttggccatccagttgatagataagatgcttgtgtttgatccaaggaagcggatcactgtgcacgaagccctggagcacccttacttgtcgatgttacatgacgccactgtggagccctctgctccggcccctttcgaattcgacttcgaggatgaagaccttaaggaggatgcactgcgagagagggtttggaacgaaatgttgttctaccaccctgaagcggccgccgagacgtgattcctcacatacctagttgaggaccttctttttcttttctctttttctgcttcttcttcttcttcttcttcttcttcctcttctttggtttgctgcttctttatctcctaacctttgaacgtcacaataacctatccctgtgtagcaagcggcacgttaacg

SEQ ID NO: 6 - protein, 368 aa, Physcomitrella patens
MATKVEVPEGTCPPGKHHYMLWRSVFEIDTKYAPIKPIGKGAYGVVCSAKNNETGDRVAIKKITNAFENTTDARRTLREIRLLRHLFHENIIAVKDIMKPVGRQTFNDVYIVYELMDTDLHQIIRSSQTLTDDHCQYFIYQLLRGLKYVHSANVLHRDLKPSNLLLNASCDLKICDFGLARTGSDKGQFMTEYVVTRWYRAPELLLSCDEYTSAIDMWSVGCIFAELLGRKPLFPGKDYIHQLKLIISIIGSPDETDLHFIQSQKARSYIRSLPFTPRVSLARLYPRANPLAIQLIDKMLVFDPRKRITVHEALEHPYLSMLHDATVEPSAPAPFEFDFEDEDLKEDALRERVWNEMLFYHPEAAAET

SEQ ID NO: 7 - DNA, 1110 bp, Triticum aestivum
atggcgatgatggtggatccaccgaacggcatgggaaaccacgggaagcactactacaccatgtggcagaccatgttcgagattgacaccaagtacgtgccgatcaagcccatcggaagaggagcctacgggatagtttgctcctcgatcaaccaggagaccaacgagaaggtcgccatcaagaagataaacaacgtctttgacaaccgcgtggatgcgctgaggacgctgcgcgagctgaagctccttcggcacctgcgccatgagaatgtcattgccttgaaggatataatgatgccgatacataggaggagcttcaaggatgtctacttggtctccgagctcatggacacggatctgcatcagattgtcaagtcgtctcagccgctgtccaatgaccactgtcagtatttcctttttcagctgctccgaggactgaagtaccttcattcagcagggatactccatagagacctgaagcctgggaaccttctggtcaatgcaaactgtgacctgaagatctgtgactttggtctggctcgcacaaataacactaaaggtcagtttatgactgaatacgttgtcacccgctggtacagagctcccgagctgctgctctgctgcgacaactatggcacctccatagatgtctggtctgttggctgcatctttgctgagctacttggccgcaagccgatctttccaggaaccgagtgccttaatcagcttaagctcatagtcaatgttcttggcaccatgagcgaggctgacctcgcgttcattgacaacccgaaagcgcgcaactacattaaatcccttccatacaccccagggattcccctcagtagcatgtacccgcaagcgcaccctcttgccattgacctgttgcagaagatgcttgtctttgacccttccaaaaggatcagtgtcacccaggctctggagcacccctacatgtccccgctgtatgatcccagcgcaaaccctcctgcgcaggtgcccatcgatctcgacatagatgaaaacattggcacagatatgatccgagaaatgttgtggcaggagatgctccagtaccaccccgaggccgccaggatggtgaatatgtga

SEQ ID NO: 8 - protein, 369 aa, Triticum aestivum
MAMMVDPPNGMGNHGKHYYTMWQTMFEIDTKYVPIKPIGRGAYGIVCSSINQETNEKVAIKKINNVFDNRVDALRTLRELKLLRHLRHENVIALKDIMMPIHRRSFKDVYLVSELMDTDLHQIVKSSQPLSNDHCQYFLFQLLRGLKYLHSAGILHRDLKPGNLLVNANCDLKICDFGLARTNNTKGQFMTEYVVTRWYRAPELLLCCDNYGTSIDVWSVGCIFAELLGRKPIFPGTECLNQLKLIVNVLGTMSEADLAFIDNPKARNYIKSLPYTPGIPLSSMYPQAHPLAIDLLQKMLVFDPSKRISVTQALEHPYMSPLYDPSANPPAQVPIDLDIDENIGTDMIREMLWQEMLQYHPEAARMVNM

SEQ ID NO: 9 - DNA, 1116 bp, Glycine max
atggcgactcctgttgagcctccaaatgggatcagaactgaagggaagcattattattccatgtggcaaaccctgtttgagattgactcaaaatacgttcccatcaagccgattggtcgcggagcatatggaattgtgtgctcttctgtgaatagagagataaatgagaaggttgccatcaagaagatacagaatgcctttgaaaaccgggttgatgccctgaggactttgcgcgaactcaagcttcttcgccaccttcaccatgagaatgtgattgctttgaaggacatcatgatgcctgttcacaggaatagtttcaaggatgtctatctagtttatgaactcatggacacggatttgcatcagattattaagtcttctcaagctttgtctaatgatcactgccagtatttcctctttcagttgctccggggcttgaaatatcttcactccgctaacattcttcatcgtgacttgaaacctgggaatcttctaatcaatgcaaattgtgacctaaaaatatgtgatttcgggctagctcgtactaattgcagcaagaaccagttcatgaccgagtatgttgtcactcggtggtatagggcaccagagctcctactctgctgtgacaactatgggacatctattgatgtttggtcagttggatgtatctttgcagagcttcttggccgaaaaccgattttccctggttcagagtgtctcaaccagctgaagttgattatcaatatccttggtagtcaaagggaggaggatattgaattcattgataacccaaaggcaaagaagtatatcaaatcacttccttattctcctggaagccccctttcgcgactttatcctaatgcgcatccattggcaattgatcttctggcaaagatgcttgttttcgatccaacaaagaggatcagtgtcactcaagcacttcaacacccttacatggcccctctgtatgatcctaactgtgaccctccagccgtcattccaattgatcttgacattgatgaggatctaggggaagagatgataagggacatgatgtggaaagaaatgcttcattaccatcctgaatctgctatggagagtgcagggttgtgctaa

SEQ ID NO: 10 - protein, 371 aa, Glycine max
MATPVEPPNGIRTEGKHYYSMWQTLFEIDSKYVPIKPIGRGAYGIVCSSVNREINEKVAIKKIQNAFENRVDALRTLRELKLLRHLHHENVIALKDIMMPVHRNSFKDVYLVYELMDTDLHQIIKSSQALSNDHCQYFLFQLLRGLKYLHSANILHRDLKPGNLLINANCDLKICDFGLARTNCSKNQFMTEYVVTRWYRAPELLLCCDNYGTSIDVWSVGCIFAELLGRKPIFPGSECLNQLKLIINILGSQREEDIEFIDNPKAKKYIKSLPYSPGSPLSRLYPNAHPLAIDLLAKMLVFDPTKRISVTQALQHPYMAPLYDPNCDPPAVIPIDLDIDEDLGEEMIRDMMWKEMLHYHPESAMESAGLC

SEQ ID NO: 11 - DNA, 1128 bp, Linum usitatissimum
atggcaactccagttgagccaccaaatggggttaggattcaagggaagcactattattcaatgtggcaaactttgtttgagatcgatataaagtatgtccctataaagccaatcggccgtggtgcttatggtatagtgtgttcttcagtgaatagggaaaccaatgagaaagttgctattaagaagatacacaatgtgttcgaaaaccgtattgatgccctcaggactctgcgtgaactcaagctccttcgccatcttcgccacaccaatgtgattgctttgaaagatgtgatgatgccaatccacaggaggagcttcaaggatgtttatttcgtttacgaattaatggataccgatctccaccagattattaagtcctctcagtcactctccaatgatcactgccagtacttcctattccagctgcttagaggtctgaagtatcttcactcagcaaacatcctacaccgtgatctcaaacctggaaacctcctcatcaacgcaaattgcgacctcaaaatctgcgatttcggcctagcaagaaccagcacgggaaaaggccagttcatgaccgagtatgtagtgacgcgctggtaccgtgctccggagctcctcctttgctgcgacaactatggaacgtcgatcgatgtctggtctgtgggatgcatatttgctgaactactgggaaggaagcctctctttcccggcacagaatgtctcaaccaactgaagctcataatcaacattcttggtagccagagggaagaggatctcgagttcatcgacaacgcaaaagctaaaaagtttataaaatcacttccttattctccagggactgcattcgcccatctttaccccaatgcgcatcctttggccattgacctattgaggaagatgcttatctttgacccttcgaagaggataactgtgatcgaagcattacagcatccctacctgtctccactttatgatcccaactgtaatcctcctgctcagttgctagtcgatgatcttgagattgatgaggagttgggggaagaaatgatccgtgagactatgtggaaggagatgttacattaccatcctgagtttgcagcagcaagtggtggggagttctgctaccagtag

SEQ ID NO: 12 - protein, 375 aa, Linum usitatissimum
MATPVEPPNGVRIQGKHYYSMWQTLFEIDIKYVPIKPIGRGAYGIVCSSVNRETNEKVAIKKIHNVFENRIDALRTLRELKLLRHLRHTNVIALKDVMMPIHRRSFKDVYFVYELMDTDLHQIIKSSQSLSNDHCQYFLFQLLRGLKYLHSANILHRDLKPGNLLINANCDLKICDFGLARTSTGKGQFMTEYVVTRWYRAPELLLCCDNYGTSIDVWSVGCIFAELLGRKPLFPGTECLNQLKLIINILGSQREEDLEFIDNAKAKKFIKSLPYSPGTAFAHLYPNAHPLAIDLLRKMLIFDPSKRITVIEALQHPYLSPLYDPNCNPPAQLLVDDLEIDEELGEEMIRETMWKEMLHYHPEFAAASGGEFCYQ

SEQ ID NO: 13 - DNA, 1572 bp, Brassica napus
atgatgcagcaagatcctcagcgtaaaaagaacaatctagagatggagttcttttctgactacggtgacgccagcaggttcaaaatccaagaagtaatcggaaaaggcagctacggagtcgtctgctcagccatagacacccttaccggcgagaaagtcgccatcaagaaaatacacgacatcttcgagcatatatcagacgccgcgaggatcctccgggagataaaactcctcaggctcctgaggcatccggacatagtcgaaatcaagcacattatgctccccccttcgcggagagagttcaaagacatctacgttgtgtttgagctcatggagtctgatcttcaccaagttattaaagccaatgatgatttgaccaaagagcattaccagtttttcctttatcagttgttgcgtacgctcaagtacattcacacagctaatgtctaccatagagatctgaagccaaagaatatattggcaaatgcaaattgtaaactcaagatttgtgattttggattggctagagttgctttcaatgatacccccacaacaatcttttggacagactatgttgctacaagatggtatagagctcctgagctttgtggatctttttactcaaagtatacaccagcaattgatatctggagtataggctgcatttttgctgaagtatggaggggaaaaccacttttccttggaaagaaggtggttcaccagcttgatcttatgactgatctgctcgggacaccttccctggacaccatctcccgggtgaggaatgagaaggcgaggaggtacttgacaagcatgaggaagaagccacctataccatttactcagaagtttccaaacgcagatcctttgtccttgaagctgttcgagaggcttctcgcttttgatccaaaagaccgaccaaccgctgaagaggcacttgcggatccatatttcaaaggactggcgaaagtggagagggagccatcgtgtcagcccattacgaagatggagtttgagttcgagagaaggaaggtcactaaagaagatatcagagagctgatatctagggagatacttgagtaccatcctcagctgctaaaagatcacatgagcggtgctgataaaaccaattttctctatccaagtgctgttgatcaatttagaagacagtttgcacatcttgaagaaaacagtgggaagactggccctgttgcacctctagaaaggaaacatgcctctcttcccaggtctacagttatacactcaacggcagttgcaagaggagggcaaccgaaacttatgaataacacaaacacattgaaccctgaaactactcaaagcattcctcttaatcaatacacaacatcacaagcacctcaaagaaacctctcaggtaccaaaccaagcacattcatgggcccggtggcgccttatgacaatggcagaaccagcagagaagcatatgacccgagatcattaatccgcagcactgctcttccctttccacaacagtctgctgcagcaaccatgggaaagcaacaagagaggagaaacaacaaccatggagtctga

SEQ ID NO: 14 - protein, 523 aa, Brassica napus
MMQQDPQRKKNNLEMEFFSDYGDASRFKIQEVIGKGSYGVVCSAIDTLTGEKVAIKKIHDIFEHISDAARILREIKLLRLLRHPDIVEIKHIMLPPSRREFKDIYVVFELMESDLHQVIKANDDLTKEHYQFFLYQLLRTLKYIHTANVYHRDLKPKNILANANCKLKICDFGLARVAFNDTPTTIFWTDYVATRWYRAPELCGSFYSKYTPAIDIWSIGCIFAEVWRGKPLFLGKKVVHQLDLMTDLLGTPSLDTISRVRNEKARRYLTSMRKKPPIPFTQKFPNADPLSLKLFERLLAFDPKDRPTAEEALADPYFKGLAKVEREPSCQPITKMEFEFERRKVTKEDIRELISREILEYHPQLLKDHMSGADKTNFLYPSAVDQFRRQFAHLEENSGKTGPVAPLERKHASLPRSTVIHSTAVARGGQPKLMNNTNTLNPETTQSIPLNQYTTSQAPQRNLSGTKPSTFMGPVAPYDNGRTSREAYDPRSLIRSTALPFPQQSAAATMGKQQERRNNNHGV

SEQ ID NO: 15 - DNA, 1692 bp, Glycine max
atgcttcctgatcagagaaaaaagtcatctgtagaggtggacttctttactgaatacggtgaagggagcagatacagaatagaggaagtaattggtaaaggaagctatggtgttgtctgctctgcatatgatacacacactggagaaaaggttgcaataaagaaaataaatgacatatttgaacatgtttctgatgccactcgcattcttcgtgagattaagcttcttagacttttacgccatccagatattgtggagatcaaacatattctgttacctccttctagaagggaattcaaggatatatatgttgtcttcgaactcatggaatctgatttacatcaggtcatcaaagctaatgatgatctgacaccagagcattaccagttttttttgtatcagcttcttcgaggcatgaagtatattcatacagcaaatgtttttcaccgtgatctaaagccaaaaaacattttagcaaatgctgactgcaaactgaagatttgcgactttggtcttgccagagtggctttcaatgatactcccactgctattttctggacagattatgttgcaaccaggtggtatagggctcctgagttgtgtggatcctttttttccaagtatacaccagctatagacatatggagcattggctgcatttttgcagaacttttgacgggaaaacctcttttccctgggaagaatgttgtccatcaactagaccttatgactgatcttcttggaactccatctcttgaagccattgctagggtacgaaatgagaaagctcggagatatttgagcagcatgcgaaagaagaagcctgttcctctctcgcagaagtttcctaatgcagacccccttgctcttcgtttgttagaaaaaatgttggcatttgagcctaaggatcggcctactgctgaagaggctctagcggatccatattttaaaggcctggccaaggttgagagagaaccatctgctcagccagttactaagatggagtttgaatttgagagacgccggataacaaaggaagatgtacgagagcttatataccgagagattctggagtatcatccaaagatgttgaaggaatttctagagggatcagagccaacaggtttcatgtatccaagtgctgtggaccacttcaagaaacaatttgcatatcttgaggagcattacggcaaaggggggactgttactccccctgagaggcaacatgcatcattaccaagaccttgtgtattgtattcagaccactcaatgcagaatacatctgaggttgcagatgacctatccaaatgttgcatcaaagaagttgagaaacaacccatagatagcagtagtgccatccctatgtctcgacttcctttacaagcaccacaaaatattcaaggtgttgctgcaaggcctggaaaggttgtgggttcggtaatgcgttacaacaactgtggggtagccgggacggccgaggctgaacagcgtcgggtggtcaggaatccatctgtttcagctcagtacgcagcatcgagctgttcatatcctaggagaaactcaggctataaaagtgaaagggggacagaggagggtgggattgaaggttcaaatggactgcagccaaagcctcaatacatggcaagaaaagtggctgctgctcaagctggacctggtggtcagtggtattga

SEQ ID NO: 16 - protein, 563 aa, Glycine max
MLPDQRKKSSVEVDFFTEYGEGSRYRIEEVIGKGSYGVVCSAYDTHTGEKVAIKKINDIFEHVSDATRILREIKLLRLLRHPDIVEIKHILLPPSRREFKDIYVVFELMESDLHQVIKANDDLTPEHYQFFLYQLLRGMKYIHTANVFHRDLKPKNILANADCKLKICDFGLARVAFNDTPTAIFWTDYVATRWYRAPELCGSFFSKYTPAIDIWSIGCIFAELLTGKPLFPGKNVVHQLDLMTDLLGTPSLEAIARVRNEKARRYLSSMRKKKPVPLSQKFPNADPLALRLLEKMLAFEPKDRPTAEEALADPYFKGLAKVEREPSAQPVTKMEFEFERRRITKEDVRELIYREILEYHPKMLKEFLEGSEPTGFMYPSAVDHFKKQFAYLEEHYGKGGTVTPPERQHASLPRPCVLYSDHSMQNTSEVADDLSKCCIKEVEKQPIDSSSAIPMSRLPLQAPQNIQGVAARPGKVVGSVMRYNNCGVAGTAEAEQRRVVRNPSVSAQYAASSCSYPRRNSGYKSERGTEEGGIEGSNGLQPKPQYMARKVAAAQAGPGGQWY

SEQ ID NO: 17 - DNA, 1122 bp, Glycine max
atgtctgctgttgagtcagctgaacacaacaacatcagaggagtaccaactcatggtggacgctatgttcagtacaatatctatggcaatctcttcgaagtttccagaaagtatgtccctcctattcgccctgtcggtagaggtgcttatggtattgtttgcgctgctgtaaatgcagagacaggcgaggaagttgccattaagaagattggcaatgcattcgacaacagaatagatgccaaaaggaccttacgggaaattaaacttcttcggcacatggatcatgcaaatattatgtccattaaagatattatacgtcctccacagaaggaaaacttcaatgatgtgtaccttgtttctgagttaatggacacagatctgcatcaaataattcgttccaatcagcaattgactgatgatcattgtcggtattttctgtatcaattgttacgagggctcaaatatgtacattcagcaaatgttttgcaccgagatctaaagcctagtaatttgctattgaatgccaattgtgaccttaagattgcggactttggtcttgctagaaccacatctgaaactgactttatgactgagtatgtggtcactagatggtaccgagctcccgaattgcttcttaattgttcagaatatacagcagccattgatatatggtctgttggttgcatacttggtgaaatcataacaagacaaccgctctttcctggcaaagattatgttcatcagctgagacttatcacagagctgataggttcgccagatgatgccagccttggatttctacgaagtgataatgctcgtagatacgtaaaacagcttccgcagtatccaaaacaaaacttttctgctagatttcccaccatgtctcctggtgcggttgacttgctagagaagatgctcatctttgatccaaacaggcgtattacagttgacgaggcgttgagccacccatacatgtcacctctccatgacatcaatgaggaacctgtttgcaccagacctttcagttttgactttgagcaaccatcattcactgaagaagacatcaaggaactcatctggagagaatctgtgaagttcaatcctgttccaccagtctactga

SEQ ID NO: 18 - protein, 373 aa, Glycine max
MSAVESAEHNNIRGVPTHGGRYVQYNIYGNLFEVSRKYVPPIRPVGRGAYGIVCAAVNAETGEEVAIKKIGNAFDNRIDAKRTLREIKLLRHMDHANIMSIKDIIRPPQKENFNDVYLVSELMDTDLHQIIRSNQQLTDDHCRYFLYQLLRGLKYVHSANVLHRDLKPSNLLLNANCDLKIADFGLARTTSETDFMTEYVVTRWYRAPELLLNCSEYTAAIDIWSVGCILGEIITRQPLFPGKDYVHQLRLITELIGSPDDASLGFLRSDNARRYVKQLPQYPKQNFSARFPTMSPGAVDLLEKMLIFDPNRRITVDEALSHPYMSPLHDINEEPVCTRPFSFDFEQPSFTEEDIKELIWRESVKFNPVPPVY

SEQ ID NO: 19 - DNA, 1134 bp, Linum usitatissimum
atggcaggaggatatgcccacagcaatggaaccggcggtcagtaccctgatttccctgccattcctattcacggcggtcaatttgttcagtataacatattcgggaatcagtttgagatcaccccaaagtataggcctccgattatgcccatcggccgcggcgcttacggcatcgtctgctcggtattgaactcggagacgaacgagatggtggcgatgaagaagatagccaatgcttttgacaaccacatggacgccaaacgcactctccgtgagattaagcttctccgccacctcgatcacgagaacgtgattggaatcagagatgtggttcctccgccgttgaggagagagtttacagatgtctacatcgcaactgagctaatggacacagatctacaccagatcatccgttccaatcagggtttatcggaggagcactgtcagtatttcatgtaccagctacttcgaggattgaagtacatacactctgctcatgtaatccacagggacttgaagcccagcaatcttctgttgaatgcaaattgtgacttgaagatctgtgattttggtctagctaggcctgcatcggagaatgagttcatgacagaatatgttgttacaagatggtacagggcgcctgagcttctgctcaactctcaggattacactgcagctattgatgtgtggtctgttggctgtatctttatggagctcatgaatcgtaagccattgtttccaggcaaagaccaagtccaccagatgaggttgttgacagagcttcttggaacaccaagtgaatcggatctagggtttgtaaggaatgaggacgctagaaaatatatcaggcagctcagtccacatcctcgacagtcattagccaaacttttccctcatgttcatcccctggccattgatcttgtggataaaatgatgacatttgatcccacaaaaagaataactgttgaggaagcattagcgcacccttatctggaacggttacatgacatagcagatgaaccagtttgtcaagagtcattctcttttgattttgagcaacaagtattgagtgaagaacagatgaaagagatgatatacagggaggcattgtcattcaatccagagtatgcataa

SEQ ID NO: 20 - protein, 377 aa, Linum usitatissimum
MAGGYAHSNGTGGQYPDFPAIPIHGGQFVQYNIFGNQFEITPKYRPPIMPIGRGAYGIVCSVLNSETNEMVAMKKIANAFDNHMDAKRTLREIKLLRHLDHENVIGIRDVVPPPLRREFTDVYIATELMDTDLHQIIRSNQGLSEEHCQYFMYQLLRGLKYIHSAHVIHRDLKPSNLLLNANCDLKICDFGLARPASENEFMTEYVVTRWYRAPELLLNSQDYTAAIDVWSVGCIFMELMNRKPLFPGKDQVHQMRLLTELLGTPSESDLGFVRNEDARKYIRQLSPHPRQSLAKLFPHVHPLAIDLVDKMMTFDPTKRITVEEALAHPYLERLHDIADEPVCQESFSFDFEQQVLSEEQMKEMIYREALSFNPEYA

SEQ ID NO: 21 - DNA, 1215 bp, Zea mays
atgagcggaggaggcgtggacggagctccggtcgccgagttccggcagacggtgacgcacggcggccggttcctgcagtacaacatcttcggcaacctgttcgagatcacgcacaagtaccagccccccatcatgcccatcggccgcggcgcctacgggatcgtctgctcggtgatgaactccgagacgaaggagatggtggccatcaagaagatcgccaacgccttcgacaaccacatggacgccaagcgcacgctccgggagatcaagctgctgaggcacctcgaccacgagaacatcatcggcatcagggacgtgatcccgccgcccgtcccgcaggcgttcaacgacgtgtacatcgggacggagctgatggacacggacctgcaccacatcatccggtccaaccaggagctctcggaggagcactcccagtacttcatgtaccagatcctccgcgggctcaagtacatccactccgccaacgtgatccaccgcgacctcaagcccagcaacctgctggtgaacgccaactgcgacctcaagatctgcgacttcgggctggcgcgcccgtcctccgagagcgacatgatgacggagtacgtggtcacgcgctggtaccgcgcgcccgagctgctgctcaactccaccgactactcggcggccatcgacgtctggtccgtcggctgcatcttcatggagctcatcaaccgccagccgctcttccccggacgcgaccacatgcaccagatgcgcctcataaccgaggcacgagcacgacgcacgcaccacatccttcctataattcaattccttcttcttctgctgctgctgatgaacatcgccggcacgcggcaggtgatcaggacgcccacggacgatgagctcgggttcatccggaacgaggacgcgcggaagtacatgcgccacctcccgcagttcccgcgccggccgttcgtcagcctgttcccgcggatgcagcccgtcgcgctggacctcatcgagcggatgctcaccttcaacccgctgcagaggatcacagtggaagaggcgctggagcacccgtacctggaacggctacacgacgtcgccgacgagcccatctgcacggacccgttctcgttcgacttcgagcagcaggctctgacggaagaccaaatgaagcagctgatattcaacgaggccatcgaactcaaccccaacttccgatactag

SEQ ID NO: 22 - protein, 404 aa, Zea mays
MSGGGVDGAPVAEFRQTVTHGGRFLQYNIFGNLFEITHKYQPPIMPIGRGAYGIVCSVMNSETKEMVAIKKIANAFDNHMDAKRTLREIKLLRHLDHENIIGIRDVIPPPVPQAFNDVYIGTELMDTDLHHIIRSNQELSEEHSQYFMYQILRGLKYIHSANVIHRDLKPSNLLVNANCDLKICDFGLARPSSESDMMTEYVVTRWYRAPELLLNSTDYSAAIDVWSVGCIFMELINRQPLFPGRDHMHQMRLITEARARRTHHILPIIQFLLLLLLLMNIAGTRQVIRTPTDDELGFIRNEDARKYMRHLPQFPRRPFVSLFPRMQPVALDLIERMLTFNPLQRITVEEALEHPYLERLHDVADEPICTDPFSFDFEQQALTEDQMKQLIFNEAIELNPNFRY

SEQ ID NO: 23 - DNA, 1185 bp, Helianthus annuus
atggatccatcaattcacccttccgacaccgaaatgtctgacgccgccgcacctcctcctcctccgccgcagcagcagcccgtcgccggaatcgacaacatccccgccactcttagccacggcggcaggtttattcagtacaatatttttggtaacatcttcgaagttaccgctaagtataaaccgcctattatgcctattggaaaaggagcgtacggcatcgtctgttcggcgttgaattcggagacgaatgagcatgttgcgattaagaagattgctaacgcgtttgataataagattgatgcgaagaggacgctacgggagattaagcttttgcgtcatatggatcatgaaaatgttgttgcaattagagatataattccacctccagagaggaatgcatttaatgatgtctacattgcttatgagctcatggatactgatctccatcaaataattcgttccaatcaatcattatcagaggagcattgccagtattttttgtatcagatcctgcgtgggttaaaatacatacattctgcaaatgtgctgcacagagatttgaagccaagcaatcttctactgaacgctaattgtgatctgaaaatatgcgatttcggactagctcgtgttacatctgaaaccgatttcatgaccgaatatgttgtcacaagatggtaccgtgcaccagagctgctgttaaactcttctgattatactgctgccattgacgtatggtctgtgggttgcatttttatggaattaatggaccgcaagcccttatttcccggtagagatcatgtgcaccagctaagattgcttatggagttgattggaactccatcagaagcagaattagggtttcttaatgaaaatgcaaaaagatacattcgacaactacaacattatccacgacagtcattcaatgagaagtttcctcaagttcatcctgctgctattgatcttattgaaaagatgttgacatttgaccctagacagaggattacagttgaagatgcacttgctcatccatatctgacatcactgcatgacatcagcgatgagcctgtgtgcatgaccccttttaattttgactttgagcatcatgccccgactgaagaacagatgaaggagatgatttatagggaagctcttgcttttaatcctgaatatcagcatctgtga

SEQ ID NO: 24 - protein, 394 aa, Helianthus annuus
MDPSIHPSDTEMSDAAAPPPPPPQQQPVAGIDNIPATLSHGGRFIQYNIFGNIFEVTAKYKPPIMPIGKGAYGIVCSALNSETNEHVAIKKIANAFDNKIDAKRTLREIKLLRHMDHENVVAIRDIIPPPERNAFNDVYIAYELMDTDLHQIIRSNQSLSEEHCQYFLYQILRGLKYIHSANVLHRDLKPSNLLLNANCDLKICDFGLARVTSETDFMTEYVVTRWYRAPELLLNSSDYTAAIDVWSVGCIFMELMDRKPLFPGRDHVHQLRLLMELIGTPSEAELGFLNENAKRYIRQLQHYPRQSFNEKFPQVHPAAIDLIEKMLTFDPRQRITVEDALAHPYLTSLHDISDEPVCMTPFNFDFEHHAPTEEQMKEMIYREALAFNPEYQHL

SEQ ID NO: 25 - DNA, 1248 bp, Linum usitatissimum
atggacggaggagcaagtggtcccttcccgccagctgacaccgagatggcggatgcgcagccggcgcaaccccctcccggcgccgctgaccaccaccaacagcagcaacaacaggttccgcctccgggagggatcgagaatattccggcgacgctaagccacggcggacgcttcatccaatacaacattttcggcaacattttcgaggtcaccgccaagtataagcctccaatcatgcctattggcaagggcgcgtacggaatcgtctgctcggctttgaactcggagaccgcggagcatgtggcgattaagaagattgcaaatgcttttgacaacaagattgatgccaagaggactcttcgcgagatcaagcttcttcgtcacatggaccacgaaaatgtggttgccatcagggatataattccgccacccctgagagagtcatttaatgatgtctatattgcatatgaactgatggacaccgatctacatcagattatcaggtcgaatcaaggattgtcagaggagcactgccagtattttttgtaccagatccttcgtggattgaaatacatccattcagcaaacgttctacacagagatctaaagccaagcaatcttctcctgaatgccaattgtgatctgaagatttgcgactttgggcttgctcgtgtaacctctgagactgatttcatgactgaatatgttgttacaagatggtacagagcaccggagttgttgttgaactcctctgattatactgctgcaattgatgtatggtcagttggttgcatatttatggagttgatggaccggaagcctctatttcccggacgagatcatgtccaccagcttcgcttgttaatggagctcatcggcaccccttcagaggctgagctggggtttctaaatgagaatgcgaagcgatacatccgccaacttccgctctatcggcgccaatcattcaccgaaaagtttccaactgtgcacccgtcagctatcgatctcgtcaagaagatgctgacatttgatccccgacagagaataacagttgaagatgcgcttgcccatccatacctgaactcgctccatgacattagcgatgagccggtgtgcactactccgttcagtttcgactttgagcagcgtgcgctgacggaagagcagatgaaggagctgatatacagggaggcattagcgttcaacccggactatgacccttcgacgtttgatcagaatgctttctag

SEQ ID NO: 26 - protein, 415 aa, Linum usitatissimum
MDGGASGPFPPADTEMADAQPAQPPPGAADHHQQQQQQVPPPGGIENIPATLSHGGRFIQYNIFGNIFEVTAKYKPPIMPIGKGAYGIVCSALNSETAEHVAIKKIANAFDNKIDAKRTLREIKLLRHMDHENVVAIRDIIPPPLRESFNDVYIAYELMDTDLHQIIRSNQGLSEEHCQYFLYQILRGLKYIHSANVLHRDLKPSNLLLNANCDLKICDFGLARVTSETDFMTEYVVTRWYRAPELLLNSSDYTAAIDVWSVGCIFMELMDRKPLFPGRDHVHQLRLLMELIGTPSEAELGFLNENAKRYIRQLPLYRRQSFTEKFPTVHPSAIDLVKKMLTFDPRQRITVEDALAHPYLNSLHDISDEPVCTTPFSFDFEQRALTEEQMKELIYREALAFNPDYDPSTFDQNAF

SEQ ID NO: 27 - DNA, 1146 bp, Linum usitatissimum
atggtctccaccggaaatacagactccagcagctccatttctgctcccaaggctcccaacatcaagggtgtttcgacccacgccggccgctatgtgcaatacaatctctacggcaactattttgaagtccccagcaagtacgttcctcccattcgccccatcggccgtggcgcttatggcatcgtctgtgctgcggtgaattcagacacgcacgaggaagtggctatcaagaagattggaaatgcatttgacaacaaaattgacgcgaaaaggacattaagagagattaagcttctacgccatatggaccatgaaaatgttattgctatcagggacattatccgaccaccaaagaaggaggcattcaatgatgtgtatatagtgtacgaattgatggatactgaccttcatcagatcattcgttccgaccaatcgttgacggatgatcattgccagtacttcttgtatcaattgctacgtggattgaagtatgtgcactcagccaatgtactgcatcgagatcttaaacccagcaatctgcttctgaatgcaaactgtgaccttaaaattggagattttgggctagcaagaacaacgtccgagacagattttatgacagagtatgttgtcactcgttggtaccgagcaccagaattgctcctaaattgttcagagtacactgctgctatcgatatttggtctgttggttgcattcttgctgaaattgtgacaggagaacccctatttcctggaactgattatgttcatcaacttaaacttattaccgagttaataggcacaccggatgatgctagccttggtttcctaagaagtgacaacgcgagaagatacgttagaatgcttccacagttcagaaaacaaaacttctctatgaggttcctaaacacgtctccagccgctgttgatctgctggaaaagatgcttgtatttgatcccaccaaacgcattacagttgatgatgctcttagccatccatacttgtcagcccttcacataattaacgaagaacccatctgctccgcacctttccacttcgatttcgagcaaccatcatgcaccgaagagcatatcaaggagctcatctggaaggaggcagtgaatttcaatccagatcaccaacagtag

SEQ ID NO: 28 - protein, 381 aa, Linum usitatissimum
MVSTGNTDSSSSISAPKAPNIKGVSTHAGRYVQYNLYGNYFEVPSKYVPPIRPIGRGAYGIVCAAVNSDTHEEVAIKKIGNAFDNKIDAKRTLREIKLLRHMDHENVIAIRDIIRPPKKEAFNDVYIVYELMDTDLHQIIRSDQSLTDDHCQYFLYQLLRGLKYVHSANVLHRDLKPSNLLLNANCDLKIGDFGLARTTSETDFMTEYVVTRWYRAPELLLNCSEYTAAIDIWSVGCILAEIVTGEPLFPGTDYVHQLKLITELIGTPDDASLGFLRSDNARRYVRMLPQFRKQNFSMRFLNTSPAAVDLLEKMLVFDPTKRITVDDALSHPYLSALHIINEEPICSAPFHFDFEQPSCTEEHIKELIWKEAVNFNPDHQQ

SEQ ID NO: 29 - DNA, 1718 bp, Physcomitrella patens
atcccgggcgagccatggcgccacttgcttcggcgaatgggactgtttgacttcttcgcttcgcccccgcctcgcccttcaccctcctctgttcttgtcacagcctcctcctccgtctctgtctgttggctgggtaagttttgggagtgaggaggacgtggtcatggaagaagagcccccctcttttgtagtggactgtcggtaaattggacctggagcctgccggctcatcgcgtttgcttagattgtgggcgggtgctgttgaaattccttgaacttgctactggtcggaaacgctcgaattgcgactttgattgaaggtctggttgttgctgcggtcgggatcttactcagtctcttcaataggacctctgaagcagtatggagactagcagtggaactccagaattgaaagttataagtactccgacctacggaggtcattacgtgaaatatgttgtggcgggaactgatttcgaagtcaccgcgaggtacaagccaccacttcgtccgattgggcgcggagcttatggaatcgtctgttcactctttgataccgttacgggtgaggaggtggcggtcaaaaagattggaaacgccttcgacaacaggatcgatgcgaagcgaacactgcgtgaaataaaactcctccggcatatggatcatgaaaacgtcgttgccattacagacatcattcgtcccccaactagggagaatttcaacgacgtgtacattgtatacgagttgatggatacggacctacaccagatcattcgttcaaatcaagctctcacagaagaccactgtcagtattttctgtatcaaatcttgcggggcttgaagtacatccattcggcgaacgtcttgcaccgggacttgaagcccaccaaccttctcgtcaatgccaattgcgatttgaaaatcgcagattttggcttggcacgcactctctctgaaacggatttcatgactgagtatgttgtaacgaggtggtacagagctccagagctgctcctgaattgttcagcatacactgcagctattgacatttggtctgtggggtgcatcttcatggagttgcttaaccgatctgcgttgttccctgggagagactatgtgcatcagctccgcctaattacagaactcatcggaactcctgaagatagggatcttgggtttttgagaagcgacaatgctaggcggtatatcaagcacctgcctcgacagtcgcctattcccttaacccagaagttcagaggcattaatcgttctgctcttgatcttgttgaaaagatgctggtctttgatccagcgaaaagaatcacagtggaagctgccttggcgcacccttatttagcttcacttcatgacatcaacgatgagcctgcctcggtatctcccttcgagtttgacttcgaggagccccctatctcggaggagcatatcaaggatctcatttggagggaggctctggattgcagcttaggtcctgatgatatggtgcagtaacttcacacttcatctcaagttgtaaggcctactctcaattctttaggtggctacaacgctatcccggcgttgtatggttttgcaacttattcccccccgtgtgattacactattggattatagaatgacaattcgttagttcttttccctggcgctatatctttgtctgcacatttcatccagcagacattgttgctcggcgttaacgc

SEQ ID NO: 30 - protein, 375 aa, Physcomitrella patens
METSSGTPELKVISTPTYGGHYVKYVVAGTDFEVTARYKPPLRPIGRGAYGIVCSLFDTVTGEEVAVKKIGNAFDNRIDAKRTLREIKLLRHMDHENVVAITDIIRPPTRENFNDVYIVYELMDTDLHQIIRSNQALTEDHCQYFLYQILRGLKYIHSANVLHRDLKPTNLLVNANCDLKIADFGLARTLSETDFMTEYVVTRWYRAPELLLNCSAYTAAIDIWSVGCIFMELLNRSALFPGRDYVHQLRLITELIGTPEDRDLGFLRSDNARRYIKHLPRQSPIPLTQKFRGINRSALDLVEKMLVFDPAKRITVEAALAHPYLASLHDINDEPASVSPFEFDFEEPPISEEHIKDLIWREALDCSLGPDDMVQ

SEQ ID NO: 31 - DNA, 1107 bp, Brassica napus
atggcgatgttagttgagccaccaaatgggatcaaacagcaagggaaacattactactccatgtggcaaacactgttcgaaatcgacactaagtatgttcccatcaaacccatcggaagaggagcttacggtgtggtttgttcttccatcaaccgcgagaccaacgagaaggtcgccatcaaaaagattcacaatgtgttcgagaatcgcgttgacgccttgaggacgctgagagagctcaagcttcttaggcacgtgaggcatgataacgtgatcgcgcttaaagacgttatgctgcctacgaataaatcgagtttcaaagatgtttacttggtttacgagctgatggatactgatcttcatcagatcatcaaatcctctcagtctctttctgatgatcactgcaaatacttcttgtttcagttgctaagaggattgaagtatcttcactctgcaaacatccttcaccgagatttgaagccagggaacctcttagtcaacgctaactgcgatctaaagatatgcgacttcgggttagctagaacgagccagggaaatgaacagttcatgaccgagtatgtggtcacgcgttggtacagagcacctgagcttcttctctgctgtgacaactacggaacctccattgatgtctggtcggttggatgcatattcgcggagattcttggtcgaaaaccgatattcccggggacagaatgtctcaaccagcttaagctcatcatcaacgtcgttggtagccagcaagaatctgatattcggtttatagacaacccgaaagctcgaagattcatcaagtctcttccttactcgaggggtacacatctctccaatctctacccgcaagccaatcctctggctatagatttgctgcagaggatgctagtgtttgatccgaccaagagaatctctgtaaccgatgcactctcgcacccgtacatggcgggactgtttgactctggctctaatccacccgcgcatgtcccaatctctctggacatagatgagaacatggaggaacggatgatcagagagatgatgtgggacgagatgctttattaccaccctggagctgaaactgcaaacccctaa

SEQ ID NO: 32 - protein, 368 aa, Brassica napus
MAMLVEPPNGIKQQGKHYYSMWQTLFEIDTKYVPIKPIGRGAYGVVCSSINRETNEKVAIKKIHNVFENRVDALRTLRELKLLRHVRHDNVIALKDVMLPTNKSSFKDVYLVYELMDTDLHQIIKSSQSLSDDHCKYFLFQLLRGLKYLHSANILHRDLKPGNLLVNANCDLKICDFGLARTSQGNEQFMTEYVVTRWYRAPELLLCCDNYGTSIDVWSVGCIFAEILGRKPIFPGTECLNQLKLIINVVGSQQESDIRFIDNPKARRFIKSLPYSRGTHLSNLYPQANPLAIDLLQRMLVFDPTKRISVTDALSHPYMAGLFDSGSNPPAHVPISLDIDENMEERMIREMMWDEMLYYHPGAETANP

SEQ ID NO: 33 - DNA, 1119 bp, Brassica napus
atgtctggagaatcaagctctggtactacagatcattgcatcaaagtcgtacctacacacggaggccgctatattcagtacaacgtttacggacagctctttgaagtttcaagaaagtatgttcctcctatccgtcccattggtagaggcgcttgcggtattgtctgtgctgctgtgaactcagtgactggagagaaagtggctattaagaagatcggtaatgcttttgataacatcattgatgctaagagagctctacgtgaaatcaagcttctcaggcacatggatcatgagaacgtcatagccatcaaagatattgtaagacctccacaacgtgatatcttcaacgatgtttacattgtctatgagttaatggacactgatctccagcgtatcctccgttctaagcaaaccttaagccacgaccagtgccgcttctttgtgtaccagctcttaagagggcttaagtacgtgcactcggccaacatattacatcgtgatctaaggccaagcaacgtgctgcttaactccaaacacgagctaaagattggtgattttgggcttgcgagaacaacttcagacacagacttcatgaccgagtatgtggttacccgttggtacagagctcctgagctgcttcttaactgctcggagtacactgcagctatcgatatatggtctgttggttgcatattcggtgaaatcatgacgggacaaccgttgtttcctgggaaagactatgttcatcagcttaggctcatcacagagcttgtaggctctccagacaactccagtctcggtttccttcgcagtgacaacgcgagaagatacgtgaggcaacttccacgataccctaaacaagagtttgctgctagattccccaaaatgccccctaccgctattgatttgctggagagaatgctcgtctttgatccaaaccgacgtatctcagttgatgaagctctcggccatgcatacttatcaccacaccacgatgtggcaaaagaacctgtatgtccaactccttttagcttcgacttcgagcatccttcatgcacggaagaacacataaaagagcttatctacaaggagtctgtcaaattcaatcctgaccattga

SEQ ID NO: 34 - protein, 372 aa, Brassica napus
MSGESSSGTTDHCIKVVPTHGGRYIQYNVYGQLFEVSRKYVPPIRPIGRGACGIVCAAVNSVTGEKVAIKKIGNAFDNIIDAKRALREIKLLRHMDHENVIAIKDIVRPPQRDIFNDVYIVYELMDTDLQRILRSKQTLSHDQCRFFVYQLLRGLKYVHSANILHRDLRPSNVLLNSKHELKIGDFGLARTTSDTDFMTEYVVTRWYRAPELLLNCSEYTAAIDIWSVGCIFGEIMTGQPLFPGKDYVHQLRLITELVGSPDNSSLGFLRSDNARRYVRQLPRYPKQEFAARFPKMPPTAIDLLERMLVFDPNRRISVDEALGHAYLSPHHDVAKEPVCPTPFSFDFEHPSCTEEHIKELIYKESVKFNPDH

SEQ ID NO: 35 - DNA, 1122 bp, Brassica napus
atgtcggcggagaactgttttggcggcggcggtggtgatcagagcacgaaaggattggctactcacggtggtcagtacgttcagtacaatgtctacggaaacatcttcgaagtgactagaaagtacgttcctcctcttcgccccatcggcagaggcgcttacggcatcgtctgtgctgctacaaactcagagacgggagaggaagtagctatcaagaagatcggtaacgcttttgacaacatcatcgacgccaagagaaccttgagagagattaagctcctcaagcacatggatcacgagaatgttattgctgtgaaggatataataagaccacccctgagagagaacttcaacgatgtttacattgtttatgagctcatggacactgatctccaccagattatacgctctaaccaacccttaactgatgatcattgtcggttcttcttgtatcagttgttgcgtgggctcaagtacgttcattcagccaatgtgttacaccgagatctaaagcccagcaatttgctcctgaacgcaaactgtgatctaaagcttggggatttcgggcttgcgaggaccaaatccgagactgacttcatgactgagtacgttgttacacgctggtaccgagctccagagttacttcttaactgctccgagtacacagcagcgatcgatatctggtccgtcggttgtattctcggtgaaacaatgacaagagagcccttgtttccgggtaaagattatgttcatcagcttaggcttatcactgagcttataggatcacctgatgattcaagcttggggttcttaaggagcgacaacgcaaggagatacgttaaacagcttccacagtacccgagacagaacttcgctgctaggttcccaaacatgtcagctggcgcagccgatttgcttgagaaaatgctcgtctttgatccaagcagacgcatcactgttgatgaggcgttgtgccacccatatttggcggcgctgcacgatataaacgaggaaccggtgtgtgtgaggccgttcaatttcgattttgagcaaccttctttgacagaagagaacatcaaggagcttatatatcgtgaaacagtccacctcaatcctcagtaa

SEQ ID NO: 36 - protein, 373 aa, Brassica napus
MSAENCFGGGGGDQSTKGLATHGGQYVQYNVYGNIFEVTRKYVPPLRPIGRGAYGIVCAATNSETGEEVAIKKIGNAFDNIIDAKRTLREIKLLKHMDHENVIAVKDIIRPPLRENFNDVYIVYELMDTDLHQIIRSNQPLTDDHCRFFLYQLLRGLKYVHSANVLHRDLKPSNLLLNANCDLKLGDFGLARTKSETDFMTEYVVTRWYRAPELLLNCSEYTAAIDIWSVGCILGETMTREPLFPGKDYVHQLRLITELIGSPDDSSLGFLRSDNARRYVKQLPQYPRQNFAARFPNMSAGAADLLEKMLVFDPSRRITVDEALCHPYLAALHDINEEPVCVRPFNFDFEQPSLTEENIKELIYRETVHLNPQ

SEQ ID NO: 37 - DNA, 1119 bp, Glycine max
atggaaggaggaggagctgctccgccggccgacaccgtgatgtccgacgcggcgcctccgccgcagcaagcgatggctatggggatcgagaatattccggcgacgctgagccacggtggcaggttcatccaatacaacatattcggaaacatattcgaagtcaccgccaaatacaagccacccatcatgcccatcggaaaaggcgcatacggcatcgtttgctcggctttgaactcggagacgaatgagcacgttgccatcaagaagattgcgaatgcatttgacaacaagattgatgcaaagaggaccctccgtgaaatcaagctgcttcgtcacatggatcatgaaaacgtggttgcaatcagggatatagtgccaccacctcaaagggagatattcaatgatgtttacattgcatatgagttgatggacactgaccttcaccaaattattcgttcaaaccaaggattatcagaggagcactgtcagtattttctgtatcaaatcctccgtgggttgaagtacatacattctgccaatgttctgcatagggacttaaaacctagcaaccttctcctgaatgccaactgtgacttaaaaatttgtgattttggactggctcgtgtcacgtctgaaactgattttatgactgaatatgttgttacaagatggtaccgtgcaccagagcttctgttgaactcttctgattacactgcagcaattgatgtatggtctgttggttgtattttcatggaactgatggatcgcaagcctttgtttcctggcagagatcatgtgcatcagttgcgtctacttatggagctgattggcaccccatcagaggctgatttggggttcctgaatgaaaatgctaagagatacattaggcaactacccctttaccgctgtcaatctttccaggaaaagtttccacatgtccatcctgaagctatagatcttgttgaaaaaatgttaacttttgatcctagaaaaaggattactgtgaagatgcacttggcgcacccgtacttgacatctctgcatgacatcagtgatgaaccagtgtgcatgactcccttctacttgactgtgaacacatgctcgacggaggacagatga

SEQ ID NO: 38 - protein, 372 aa, Glycine max
MEGGGAAPPADTVMSDAAPPPQQAMAMGIENIPATLSHGGRFIQYNIFGNIFEVTAKYKPPIMPIGKGAYGIVCSALNSETNEHVAIKKIANAFDNKIDAKRTLREIKLLRHMDHENVVAIRDIVPPPQREIFNDVYIAYELMDTDLHQIIRSNQGLSEEHCQYFLYQILRGLKYIHSANVLHRDLKPSNLLLNANCDLKICDFGLARVTSETDFMTEYVVTRWYRAPELLLNSSDYTAAIDVWSVGCIFMELMDRKPLFPGRDHVHQLRLLMELIGTPSEADLGFLNENAKRYIRQLPLYRCQSFQEKFPHVHPEAIDLVEKMLTFDPRKRITVKMHLAHPYLTSLHDISDEPVCMTPFYLTVNTCSTEDR

SEQ ID NO: 39 - DNA, 1176 bp, Glycine max
atggaaggaggaggagctgctccgccggccgacaccgtgatgtccgacgcggcgcctccgccgcagcaagcgatggctatggggatcgagaatattccggcgacgctgagccacggtggcaggttcatccaatacaacatattcggaaacatattcgaagtcaccgccaaatacaagccacccatcatccccatcggaaaaggcgcatacggcatcgtttgctcggctttgaactcggagacgaatgagcacgttgccatcaagaagattgcgaatgcgtttgataacaagattgatgcaaagaggaccctccgtgaaatcaagctgcttcgtcacatggatcatgaaaacgtggttgcaatcagggatatagtgccaccacctcaaagggagatattcaatgatgtttacattgcatatgagttgatggacactgaccttcaccaaattattcgttcaaaccaaggattatcagaggagcactgtcagtattttctgtatcaaatcctccgtgggttgaagtacatacattctgccaatgttctgcatagggacttaaaacctagcaaccttctcctgaatgccaactgtgacttaaaaatttgtgattttggactggctcgtgtcacgtctgaaactgattttatgactgaatatgttgttacaagatggtaccgtgcaccagagcttctgttgaactcttctgattacactgcagcaattgatgtatggtctgttggttgtattttcatggaactgatggatcgcaagcctttgtttcctggcagagatcatgtgcatcagttgcgtctacttatggagctgattggcaccccatcagaggctgatttggggttcctgaatgaaaatgctaagagatacattaggcaactacccctttaccgctgtcaatctttccaggaaaagtttccacatgtccatcctgaagctatagatcttgttgaaaaaatgttaacttttgatcctagaaaaaggattactgttgaagatgcactggcgcacccgtacttgacatctctgcatgacatcagtgatgaaccagtgtgcatgactcccttcaactttgactttgaacaacatgctttgacggaggaacagatgaaagaactgatataccgagaggctctagcatttaaccctgagtatcagcagtag

SEQ ID NO: 40 - protein, 418 aa, Glycine max
MGNCNACVRVDDVADSNRGKNKNNKKTKPNPYAEEEIRSGVPIRVLKDVTSRSLIGDKYVIGRELGRGEFGITYLCTDRETKQELACKSISKRKLRTAIDVEDVRREVAIMSTLPEHANVVKLKATYEDEENVHLVMELCAGGELFDRIVARGHYSERAAAYVARTIAEVVRMCHANGVMHRDLKPENFLFANKKENSVLKAIDFGLSVFFKPGERFSEIVGSPYYMAPEVLKRNYGPEVDVWSAGVILYILLCGVPPFWSEDERGVALAILRGVIDFKREPWPQISDSAKSLVRQMLEPDPKKRLTAEQVLEHSWLQNAKKASNVPLGDIVRTRLKQFSVMNRFKKRALRVIAEHLSVEEVEIIKDMFTLMDTDKDGKVTYEELKVGLRKVGSQLAEPEIKMLMEVVGFLNFIPFIM

SEQ ID NO: 41 - DNA, 2135 bp, Physcomitrella patens
ccgggttgttgcccaatcttgcagcagtaaatgtatgggattgacgggagctagggactgaatgggcaacacttgtgtaggagcggctggatactttcaaggctttaccagtgcaatagcgctgggaggccgaagctccaggtcaaatagcgaaagatcgcctactgcatccaaaatagatgacagtgatcgcaaagttgaagtagatacccctgcaactcaacagaatccgccacgccagaaccacatcccttctgtggataccgctgatcagcagcagtttaaggaggttattgaagccatgaagaaagacagagaaatcaagtccgtttccggtcaaagcttaactcactctgttctgcagcggaaaactgaaaacctgagagacttgtacattttgggaaagaaacttggacaaggccaatttggcactacctatctgtgcattgagaaggctacgaataaggagtatgcatgcaagtctatagcgaaaaggaagctcatctccaaagaagatgtggaagatgttcgtcgtgagttgcaaattatgcatcacctttcgggtcatccaaacattgtcatgattaaaggggcatatgaagatcctgcttcggttcatttagtgatggagctttgtgcaggtggagagctttttgatcgcatcattcagagagggcagtactctgaggccaaagcggcggtacttactcgcacaattgtaggtgtggttgagacctgccattctctaggggtgatgcacagagacttgaagccggaaaattttctgttctctagtacaaaggaagatgcggctttaaagacgactgatttcgggttgtcggtgtttttcaagcctggagaagtttttagggatgtggtaggaagcccatactatgttgcacccgaggtattgaggaaaaattatggccctgaagctgatgtctggagtgctggagtaattctatacatccttcttagtggagttcctcctttctgggcagagactgagcagggaatttttgaacaggttttgaaatcagagcttgattttgcctcagatccatggcctaaaatttctgatagtgccaaggaccttattcgcaaaatgctcaatcctcaggcctctaaaaggctgaaagctcatcaagtactgtgccatccctggatctgtgaagatggagtggcaccggacaggcctattgattcagcagtgcagtctcggctcaaacacttctctgcgatgaacaaactgaaaaaaattgcaattagggtcattgctgaatctttatcagaggaagaaatagcaggtttaaaggaaatgtttaagatgatggacactgacaactcgggatcaatcagctatgacgaattgaaagctggactgaagaaagtgggttccattcttaaagaggaagatatacggcagctgatggatgctgcggatgttgatggcaatggaacgattgattacggggagtttctagccgccacccttcacttgaataaaattgaacgtgatgagaacatgcttgcagctttttcgtacttggacaaggacaatagtggctatcttacgattgatgagcttcaacatgctttagcccagttcaacatgggagacatatctgtggatgaattgcttcatgaagttgatcaaaacaatgacggtcagattgactatgctgagtttgttacgatgatgcgcaagggaaatcctggtgctgctggtcgatcgtcatttcggaacagccaaagcttgagcttaaatgatgtcttgatgatgggatagaccattgaaggagtcttgatgaatccttataagtcaagctgaccatatttcttcgtagcatggtgggcttaagttcccgcccgtatgttattcctgttaatcctccatgtgcatgagaggaaatgattactgtagactctaaagccgtggatacgttcctgttcaatccagcgaagctctccagctttgtggacaaatgtattaggcatacaatgctgccggttatgcttattgtttagacctgtgatgggttttagatgatgctgaggtagtgaaaaactctaggcgtgtagtctgttcccacagtgatatgtctatgcgaagagaacattttctgatgagctcg

SEQ ID NO: 42 - protein, 575 aa, Physcomitrella patens
MGNTCVGAAGYFQGFTSAIALGGRSSRSNSERSPTASKIDDSDRKVEVDTPATQQNPPRQNHIPSVDTADQQQFKEVIEAMKKDREIKSVSGQSLTHSVLQRKTENLRDLYILGKKLGQGQFGTTYLCIEKATNKEYACKSIAKRKLISKEDVEDVRRELQIMHHLSGHPNIVMIKGAYEDPASVHLVMELCAGGELFDRIIQRGQYSEAKAAVLTRTIVGVVETCHSLGVMHRDLKPENFLFSSTKEDAALKTTDFGLSVFFKPGEVFRDVVGSPYYVAPEVLRKNYGPEADVWSAGVILYILLSGVPPFWAETEQGIFEQVLKSELDFASDPWPKISDSAKDLIRKMLNPQASKRLKAHQVLCHPWICEDGVAPDRPIDSAVQSRLKHFSAMNKLKKIAIRVIAESLSEEEIAGLKEMFKMMDTDNSGSISYDELKAGLKKVGSILKEEDIRQLMDAADVDGNGTIDYGEFLAATLHLNKIERDENMLAAFSYLDKDNSGYLTIDELQHALAQFNMGDISVDELLHEVDQNNDGQIDYAEFVTMMRKGNPGAAGRSSFRNSQSLSLNDVLMMG

SEQ ID NO: 43 - DNA, 2882 bp, Physcomitrella patens
ggaggcgaagggactcatgtcggaatgggctgagtgctcgtttggggtggttattggtacctgagttactcgagttgggtttagcaatcacttactatctgtggaagaattggacaggttcttctcgtgcgctttccgctgcacagctgtgtatggtcgcagtggcgaagctccacgaacgtcctgaattgtttaattttgtgaaacaagcccatatagggcgttgggaatatcttgaattgtcgtgtatgagtagcgatggagattgtacgcagtggaatgccaggtttatctagatgtacaattgaggacctttagaatgtgaattcgtgtagtttgggagcagggagtactagggtggacgcgaattctctagcaatagctacacggggtagcagcaacatctcgaattcccggtagattcaaaggagtgtctgggacgaattgcacgcgggacgtaaccccgaggcgtttcggatcggcatgattttgggagcttaagatgggtaattgctgtaagaagagctcggtagcagaggaggcgacaagaaagtacaaagccccggagcaatggattacgaagaatgagccgagcgcgcagacgcaccagcaaaaacctcagaatggggccactcatacaaaacctcgaagtcggaagccgccgccgggggtagtgcatagtcggaatcgctccaaaaaagttgagaaactcgcagaatctaagcaaccagaaccctggaaatctcctccagagtccactgctgaccgtaaaaagaagccccgcgtcagagctgccatcaatgggaaagacaacaaagagatggcaccgctggggaagaggacaaacttcggctatggaagagatttcaagagcaagtacactctcggcaagctgctcggccatggccaatttgggtacacttatgtcgccattgaaaaatctacaggcagcagggtggctgtgaagacgatagagaagaagcagatgactcttcccatatcggtcgaggacgttaaacgagaggtcaagatccttcgcactctctcaggtcatgagaatgtcgtccaattctacgcatcgtttgaggatgacgaccttgtttacatcgtcatggaattgtgtgaaggaggcgagcttcttgatcgaatccttgccaagaaggatagtcgatacagtgagaaggacgccgcgaagattgtcaggcagatgttaaatgttgccgctcgatgtcatctcaacggagtggttcaccgtgacatgaagcctgagaacttcttattcaagtcaaccagtgaagactcgcctctgaaagctacagatttcggactctccgattacatcaggccaggaaatcgattccatgacgtagtcggaagcgcgtactacgtggctccagaagttttgaagaaaaaatcaggtcctgaatctgatgtgtggagtattggtgtaataacatacattttgctctgtggacggcgacctttctgggacaaaactgagaagggaatctttgatgaggttttgaagaagaacccagactatggggagaagccgtggccaactatcagttctagtgccaaagacttcgttaaaaagctgctagtgaaggatcccgccgcaagactgacggcagctcaagcattgtctcatccctgggcaaaagaaggaggggatgccttggacattccgttggacatctcggtgttatccaacatgcgggagtttgtaaaatacagccgtctgaagcaactcgctcttagggctctggcgagtactcttgatagctcggatattgcggatttgcaagatcaattcaatgctattgacatcgataggaatggcaaaataacgcttgaggagatgagagaggctttacaaaaagatcgaccctggtcaatacaggagtcgcgtattgtggagatcctgcaagcgatggacagtaatagtgacggcttggtggacttcgacgaatttgttgctgccactttgcacgtgcaccaattggaggagaccgactctgagaaatggcagagccgctcacaagctgcttttagtcaattcgacttcgacggcgacggctacatcaccgcggatgagctgaagattgccacaggactgaatggatcgatggatagcatactggttgaagctgatattgacggtgatggcaagatcagtctatctgagtttcaaaagttgctacgccaagccagtcttggctcacggaccaacgaacatcatacccttgtcacgcacaatcataggaaatgttaaacacatcatcatcgtgttgcttcttgacgaggctgaacgactgcattctcttgaggtgacaacgatgatctcgcaagcccactgcctcactgtccttgatcgccaatcttagagtattgcatcactgcagaggtttctcctactcctgatagttgtcttcggggaggattttttttttgggtcctgtttgagaagcatcgaggctctagtgccatgaaacggcacacgattctttttgttccatgtgctgcaaggcagtgccagaattgtagctacatgatgaacatgagttaggttctcacagaaaggtatgccacacacactggagcataggccatgcttgtgctactggatgcctttgtatcatggttcgcactcatttgattgcggagagcagcgtgcagcaagtaatggtgcatgcctgatgaataggtaggatcattctttcaatttgtcatgttaaatcacacggtttatgtctctgcagagtttgttttgagagtgtcatcaatcctcattggaaccttaaacctgttaatacctttcatgtcccaatcctcctaagtttacgagttaacggcgtagactttgggagtgacgatatcgc

SEQ ID NO: 44 - protein, 590 aa, Physcomitrella patens
MGNCCKKSSVAEEATRKYKAPEQWITKNEPSAQTHQQKPQNGATHTKPRSRKPPPGVVHSRNRSKKVEKLAESKQPEPWKSPPESTADRKKKPRVRAAINGKDNKEMAPLGKRTNFGYGRDFKSKYTLGKLLGHGQFGYTYVAIEKSTGSRVAVKTIEKKQMTLPISVEDVKREVKILRTLSGHENVVQFYASFEDDDLVYIVMELCEGGELLDRILAKKDSRYSEKDAAKIVRQMLNVAARCHLNGVVHRDMKPENFLFKSTSEDSPLKATDFGLSDYIRPGNRFHDVVGSAYYVAPEVLKKKSGPESDVWSIGVITYILLCGRRPFWDKTEKGIFDEVLKKNPDYGEKPWPTISSSAKDFVKKLLVKDPAARLTAAQALSHPWAKEGGDALDIPLDISVLSNMREFVKYSRLKQLALRALASTLDSSDIADLQDQFNAIDIDRNGKITLEEMREALQKDRPWSIQESRIVEILQAMDSNSDGLVDFDEFVAATLHVHQLEETDSEKWQSRSQAAFSQFDFDGDGYITADELKIATGLNGSMDSILVEADIDGDGKISLSEFQKLLRQASLGSRTNEHHTLVTHNHRKC

SEQ ID NO: 45 - DNA, 1599 bp, Brassica napus
atgggacacagacacagcaagtccaaatcctccggtccgccaccgtcctcctcctcctcctcttcctccaccaacgtcgtccaccatgtccaaccttccggagaacgccgcggatcttccggttctggccccacacccgtcggatcttcctcaaccggcggatcccgctccgccgcatctgctcagcagaacggtcggatcttaggccgtccgatggagaatgtcaggggaacgtacgatttcggcaaggagcttggtcgtggccagttcggagtcacgtatctcgtcactcacaaagagaccaaaaaactcttcgcctgcaagtcgatccccacgcgccgcctcgtccaccgtgacgacattgaagacgtccgccgtgaagtccagattatgcaccatctcagtggtcacaggaacatagtggacttgaagggagcttacgaggacagacactcggtgaatctgataatggagctgtgcgaaggaggggagcttttcgacaggatcatagcgaaaggccattacacggagagagccgctgcggatttgtgcaggcagatggtgatggttgtgcatagttgccactctatgggtgtgatgcaccgtgatttgaagcctgagaactttctctttctcagcaaagatgagaactctccgttgaaagctacagactttggtctatccgtcttctttaaaccaggagataagtttaaggatcttgttgggagtgcatactatgtggccccggaggttttgaaacggaactatggaccagaggctgatatctggagtgccggtgtgattctcttcatccttatcagcggtgttccgccgttttggggagaaaatgagacagggatctttgatgctattctaaaaggagagcttgacttctcagctgatccgtggccaacggtgtcggctggtgccaaagatcttgtgaagaaaatgttgaagtatgatcctaaagaccggcttacagctagcgaagtgctgaaccatccgtggattaaagaagatggagaggcctcagacaaaccgcttgacaatgctgtgttgtccaggatgaaacagttcagagccatgaacaaactaaagaaaatggcactgaatgtaattgcagagaacctgtctgaagaagaaatcattggtctgaaagagatgttcaaagctctagacaccgataaaaacggaatagtcaccttggaggaattgagaaccggtctcccaaagcttggcaataagatctctgaggctgaaataaaacagttaatggaagcagctgatatggatggagatggatcgatagattacttggagtttatatcagcgacaatgcatatgaacagaatcgaacgtgaggatcatttgtacactgctttccagtacttcgacaaggacaacagcgggtacataacaatggaagagctagagcaggccatgaagaaatacaacatgggtgatgacaaatccattaaagagatcattgctgaagttgacaccgatcgtgacgggaaaataaactacgaagagttcgtagcgatgatgaagaagggaaatccagaactggtgacgaaccgacgcagagtcaacatgtaa

SEQ ID NO: 46 - protein, 532 aa, Brassica napus
MGHRHSKSKSSGPPPSSSSSSSSTNVVHHVQPSGERRGSSGSGPTPVGSSSTGGSRSAASAQQNGRILGRPMENVRGTYDFGKELGRGQFGVTYLVTHKETKKLFACKSIPTRRLVHRDDIEDVRREVQIMHHLSGHRNIVDLKGAYEDRHSVNLIMELCEGGELFDRIIAKGHYTERAAADLCRQMVMVVHSCHSMGVMHRDLKPENFLFLSKDENSPLKATDFGLSVFFKPGDKFKDLVGSAYYVAPEVLKRNYGPEADIWSAGVILFILISGVPPFWGENETGIFDAILKGELDFSADPWPTVSAGAKDLVKKMLKYDPKDRLTASEVLNHPWIKEDGEASDKPLDNAVLSRMKQFRAMNKLKKMALNVIAENLSEEEIIGLKEMFKALDTDKNGIVTLEELRTGLPKLGNKISEAEIKQLMEAADMDGDGSIDYLEFISATMHMNRIEREDHLYTAFQYFDKDNSGYITMEELEQAMKKYNMGDDKSIKEIIAEVDTDRDGKINYEEFVAMMKKGNPELVTNRRRVNM

SEQ ID NO: 47 - DNA, 1587 bp, Glycine max
atgggttgttgtatgagtaaaaaagggtcagagccagaagaacacattgtttacagacatgttgctggtgctgggggtgctggtgtgtacaataatcacaagagccatgaacccccttctcatcaaccttacccattacctgagaagcatgccccttggaggcctccaccaagcccaaaacatgtttacaagcatgacacaatcactgggaagccatttgaggatgttaaacagcactacacacttgggaaggaattggggagaggccaattcggggtgacttatctctgcactgagaattcaactggttttcagtatgcctgcaagtccatttcaaagaggaagcttgtgagcagagacgacaaggaggacatgaagagggagattcaaatcatgcagcatttgagtggacaatccaacattgtggagttcaaaggtgcttttgaggataagcaatcagttcatgtggttatggagctgtgtgctggtggtgaactttttgacaggattattgccaagggccactacagtgaaagggctgctgcttcaatatgtaggcaggttgttaaggttgttaacacctgccattttatgggtgtcattcatagggatctcaagccagagaatttcttgctatctagtaaggatgacaagggacttctcaaggccacggattttggcttgtcagtcttcattgaagaaggaaaggtgtatcgagatatagttggcagtgcttactatgttgctccagaagttctacgtcgtagctatgggaaggaagcagatatatggagtgcaggagttatattgtatatcttacttagtggtgtacctccattttgggcagagacggaaaagggaatatttgatgtcatattgcaaggtcatattgattttgaaagtagtccatggccaagcatatcaaacagtgctaaggaccttgttcgcaaaatgcttataaaggatccaaagaaacgcattactgctgctcaggttctagagcacccatggcttaaagaaggtggaaatgcttctgacaagccaatagacagtgcagtgctttccagaatgaagcaattcagagcaatgaataaactaaaaaaactagccctcaaggtcattgctgaaaatctttctgaagaagagatccaaggcttgaaggcaatgttcacaaatatcgacactgacaatagtggtacaatcacatatgaggaactgagggcaggattgcaaagacttggctcaaagcttactgaagctgaagtgcagcagcttatggatgctgctgatgtagatggaaatggcacaattgactacatagaattcatcactgctacaatgcatagacacaggttagaaagagatgagcaccttcacaaggccttccaatattttgacaaagatggcagcgggtatatcacaagagatgaactagaaacagccatgaaggagtatggtatgggcaacgaggccacaatcagggaaattatatctgaagttgacacagataatgatggtagaatcaactatgatgaattttgtacaatgatgaggagtggaacccaacaacaaggcaagctattctaa

SEQ ID NO: 48 - protein, 528 aa, Glycine max
MGCCMSKKGSEPEEHIVYRHVAGAGGAGVYNNHKSHEPPSHQPYPLPEKHAPWRPPPSPKHVYKHDTITGKPFEDVKQHYTLGKELGRGQFGVTYLCTENSTGFQYACKSISKRKLVSRDDKEDMKREIQIMQHLSGQSNIVEFKGAFEDKQSVHVVMELCAGGELFDRIIAKGHYSERAAASICRQVVKVVNTCHFMGVIHRDLKPENFLLSSKDDKGLLKATDFGLSVFIEEGKVYRDIVGSAYYVAPEVLRRSYGKEADIWSAGVILYILLSGVPPFWAETEKGIFDVILQGHIDFESSPWPSISNSAKDLVRKMLIKDPKKRITAAQVLEHPWLKEGGNASDKPIDSAVLSRMKQFRAMNKLKKLALKVIAENLSEEEIQGLKAMFTNIDTDNSGTITYEELRAGLQRLGSKLTEAEVQQLMDAADVDGNGTIDYIEFITATMHRHRLERDEHLHKAFQYFDKDGSGYITRDELETAMKEYGMGNEATIREIISEVDTDNDGRINYDEFCTMMRSGTQQQGKLF

SEQ ID NO: 49 - DNA, 1737 bp, Brassica napus
atggggatgtgccacggcaaacccatcgagcaccaatcaaaacagagcctcccatctcccgacgaacctcagcctcctcctcctcctcctccggcggcgaaatcctccggctttccgttttacagcccaagccctttacccagcttgttcaaatcctctccctccgtctcgtcgagcgcgagctcaacgcctctccgcatcttcaagagacctttccctcctccttcccctgccaagcacatacgcgctttcctcgcgcgtcgccacggctcctccgccaagccccccagcgaggtctcgatccccgaaggggaggagttcgagatcggtcttgataagagcttcgggttctcgaagcacttcgcgtcgcattacgagattgatggggaggtgggtcgggggcattttgggtatacttgctctgccaagggtaaaaagggaagcttgaagggtcaagaagttgctgttaaagtcatccctaagtcaaagatgacgactgcaattgcaattgaggacgttagtagagaagtgaagatactgcgagctctgactggtcacaagaacttagtccagttctatgacgcttttgaagatgatgaaaatgtttatattgtgatggagttatgtaaaggtggtgaactcttggacaaaatacttcaaaggggtggcaaatactcagaagatgatgctaaacaagttatggttcagattcttagtgtagtagcttactgtcatctacaaggtgtggttcaccgtgaccttaaacccgagaactttctcttcagcactaaggatgagacttctcctctaaaagcaatagactttggtctctctgattacgtcaagccagatgaaaggttgaatgatattgtaggaagtgcttactacgtagccccagaggttctgcaccgtacatacggaacagaagctgacatgtggagtataggagtgattgcttatattcttctctgtgggagcagacccttttgggcacgtactgaatccggaatctttagagctgttcttaaagcagaaccaaactttgaagaagctccttggccttcactatcacctgatgctgtagattttgtgaaaaaattgctgaataaagattaccgtaaaagactaaccgcagcacaggctttgtgtcatccgtggctggttgcttcccatgagctgaagataccatctgatatgatcatatacaagcttgtgaaagtgtacataatgtcaacttctttgagaaaatctgctttgcaggctcttgccaagacattaactgtaccacagttagcttatctgagggagcagtttacattgctggggccaagcaaaaatggatacatctcaatgcagaattacaaaacagcaatcctgaagactgcaacagatgctactaaggactcacgagtattagattttgttcacatgataagttgtcttcaatacaagaagctagactttgaagagttctgtgcatcagcattaagtgtttaccagctggaagcaatggaaacgtgggagcaacacgcacggcgtgcttacgagttgtttgagaaagatgggaatagacccatcatgattgaggaacttgcatcggaacttggactggggccatcagttccagtgcacgttgtgcttcaggattggataagacattcagatgggaagcttagtttcttgggttttgtcaggctactacacggcgtttcttctcggacgttacagaaagcttag

SEQ ID NO: 50 - protein, 578 aa, Brassica napus
MGMCHGKPIEHQSKQSLPSPDEPQPPPPPPPAAKSSGFPFYSPSPLPSLFKSSPSVSSSASSTPLRIFKRPFPPPSPAKHIRAFLARRHGSSAKPPSEVSIPEGEEFEIGLDKSFGFSKHFASHYEIDGEVGRGHFGYTCSAKGKKGSLKGQEVAVKVIPKSKMTTAIAIEDVSREVKILRALTGHKNLVQFYDAFEDDENVYIVMELCKGGELLDKILQRGGKYSEDDAKQVMVQILSVVAYCHLQGVVHRDLKPENFLFSTKDETSPLKAIDFGLSDYVKPDERLNDIVGSAYYVAPEVLHRTYGTEADMWSIGVIAYILLCGSRPFWARTESGIFRAVLKAEPNFEEAPWPSLSPDAVDFVKKLLNKDYRKRLTAAQALCHPWLVASHELKIPSDMIIYKLVKVYIMSTSLRKSALQALAKTLTVPQLAYLREQFTLLGPSKNGYISMQNYKTAILKTATDATKDSRVLDFVHMISCLQYKKLDFEEFCASALSVYQLEAMETWEQHARRAYELFEKDGNRPIMIEELASELGLGPSVPVHVVLQDWIRHSDGKLSFLGFVRLLHGVSSRTLQKA

SEQ ID NO: 51 - DNA, 1743 bp, Brassica napus
atgggtctctgctacagccggaacacctcctccgtcaaagacgacgagatccccgtcgagcagccgtcgcaaaccccccggcttgcttcgatccctcagtctcccgtcccctccgaagtcaactcctacgccagcagcccgttccagagccccttaccggcgggagtagctccgtcgccggcgagaactccgggacggaagttcaaatggccgtttccgccgccgtcccccgcgaagccgatcatggcggctctgaggcggagaagaggcgcgccgccgcggccgagagacgagccgatcccggaggacagcgaggacgttgacggcgtcggaggggagaggctggacaagaacttcgggttcgggaagaacatggaagggaagtacgagttggggaaggaggtggggcgagggcattttggtcatacttgctgggctaaggccaagaaagggaagatgaaggggcagacggtggctgtcaagatcatctccaaagctaagatgacatcggctttgtctattgaagatgttcgtagagaagtgaagttgctgaaagctttatctgggcataagcatatggttaagttctatgatgtgtatgaggacaatgataacgtctatgtagttatggagttgtgtgaaggaggagagttattggacaggatcttggcgagaggtggtaaataccctgaagtagacgccaaacgtattcttgtacagattctatctgcaacagcattttttcatctccaaggtgtagtgcaccgtgacctgaagccagagaactttctcttcaccagcagaaacgaggatgcagtactcaaggtcatagactttggcttgtctgatttcattagatacgatcaacggctcaatgatgtggtaggaagcgcatactatgtagcaccagaagtactccacaggtcttacagcactgaagcagatatgtggagcatcggtgtcataagctacatactactctgtggaagcagacctttctacggaagaactgaatctgcaatattccgttgtgtgcttagagcaaaccctaattttgaggatatgccttggccttcaatctctcctactggtaaagactttgtgaaaaggcttttgaacaaggatcataggaaacgaatgacagctgctcaagctctagctcatccatggttacgtgatgaaaaccctggtttgcttcttgatttctcggtttacaagttggtcagatcctatattcgtgcctcgcctttcagaagatcagcactcaaggctctcgccaaagctatacctgatgaggagcttgtgttccttaaggcacagttcatgctcctagaccctaaagatggaggcttatctcttaacaacttcacaacggctttaacaagatatgctactgatgctatgatggaatcaaagcttcctgacattttaaacacaatgcaaccgctggtgcaaaagaaactggactttgaagagttctgtgcggctggggtcagcgtttaccaactggaagctcttgaagaatgggaacagattgcaacttcagcgtttgagcactttgaacaagaaggaaaccgagtcatatccgtccaagaactcgctggggagatgagcgtgggaccaaatgcatatcctctgctcaaggattggatccggagttcagatgggaagctgagtttcttggggtacgctaagttcttgcatggtgtgactgtacgaagctcgagctcaagacctaggtga

SEQ ID NO: 52 - protein, 580 aa, Brassica napus
MGLCYSRNTSSVKDDEIPVEQPSQTPRLASIPQSPVPSEVNSYASSPFQSPLPAGVAPSPARTPGRKFKWPFPPPSPAKPIMAALRRRRGAPPRPRDEPIPEDSEDVDGVGGERLDKNFGFGKNMEGKYELGKEVGRGHFGHTCWAKAKKGKMKGQTVAVKIISKAKMTSALSIEDVRREVKLLKALSGHKHMVKFYDVYEDNDNVYVVMELCEGGELLDRILARGGKYPEVDAKRILVQILSATAFFHLQGVVHRDLKPENFLFTSRNEDAVLKVIDFGLSDFIRYDQRLNDVVGSAYYVAPEVLHRSYSTEADMWSIGVISYILLCGSRPFYGRTESAIFRCVLRANPNFEDMPWPSISPTGKDFVKRLLNKDHRKRMTAAQALAHPWLRDENPGLLLDFSVYKLVRSYIRASPFRRSALKALAKAIPDEELVFLKAQFMLLDPKDGGLSLNNFTTALTRYATDAMMESKLPDILNTMQPLVQKKLDFEEFCAAGVSVYQLEALEEWEQIATSAFEHFEQEGNRVISVQELAGEMSVGPNAYPLLKDWIRSSDGKLSFLGYAKFLHGVTVRSSSSRPR

SEQ ID NO: 53 - DNA, 1725 bp, Brassica napus
atgggtctctgtttctcctccgccaaagtctccggccgccaacaccgcagcccccggagtcccaacccaccacatcatcccctcaccgtcgctaaacccaaaccgccgcaaacgccatgttcattcctagccgttacgatccagaaagaccacaaggcccaacagcgacgtaacgccgcgacgacggcgaataagaaaacgccgccgcagacgcaaacgcgacagacgccaacgcacgggaaggcgagagagaaggcgaagagacacggagaaaagatcccgtacggtaagcgcgtggatttcgggtacgctaaagatttcgataaccgttacaccatcgggaagttgctcggacatggccagttcggttatacgtacgtagctaccgataaaaagacaggagatcgtgtcgctgtgaagaaaatcgataaagccaagatgacactgccgatagctgtggaagatgttaggagagaggtgaagatacttcaagctttaactggtcatgaaaacgtggttcggttctacaatgccttcgaggacaagaactctgtttatatagccatggagttatgcgagggtggtgaattgctggatcggatattagccaagaaagatagtcattataccgagagagacgcggccgtggtagtgagacagatgctaaaagttgcagctgaatgtcatttacgtggtttggttcatagagatatgaaaccagagaattttctgttcaaatcaactgaagaagattcggctctaaaagctacagatttcggtttatcagacttcataaaaccaggcaagaagtttcatgatatagtagggagcgcgtattacgtagcacctgaagtattgaaacgaaggtcaggacctgaatcagatgtatggagtattggtgttatcagttacattcttctctgcgggagacgacctttctgggataagactgaagatggtattttcaaagaggtattgaagaacaaacctgacttcagaagaaaaccatggccaaccattagcaacagcgccaaagatttcgttaagaagttgttagtaaaagacccaagagctagattaacagctgcgcaggcactatcacatccatgggttagagaaggaggagatgcaactgagattcccatagacatatctgttctcagcaatatgcgtcagtttgttaaattcagccgcctcaagcaattcgcattaagggctcttgcaacgacgcttgatgaagaggagttggctgatcttagagaccagtttggtgcgatggatgctgataagaatggagccattagccttgacgagatgcggcaggcccttgcgaaagatcatccgtggaagcttaaagatgcacgagtcgctgagattcttcaagcgattgatagcaacacagatggatttgtggattttgaagagtttgttgctgctgcgttacacgtaaatcaactagaggagcatgattctgagaaatggcaacagagatcaagagcagcatttgagaaattcgatatagacggagatggatttataacagcagaagaacttcgaatgcatactggcttgaaagggtccattgagccactacttgaagaagcagacattgatcatgatggtaaaatcagtctccatgagtttcgtagacttttgaaaactgcgagtatcaaatcaagaaatgttagaaaccctcctggttatcttatttctcggaaagcctga

SEQ ID NO: 54 - protein, 574 aa, Brassica napus
MGLCFSSAKVSGRQHRSPRSPNPPHHPLTVAKPKPPQTPCSFLAVTIQKDHKAQQRRNAATTANKKTPPQTQTRQTPTHGKAREKAKRHGEKIPYGKRVDFGYAKDFDNRYTIGKLLGHGQFGYTYVATDKKTGDRVAVKKIDKAKMTLPIAVEDVRREVKILQALTGHENVVRFYNAFEDKNSVYIAMELCEGGELLDRILAKKDSHYTERDAAVVVRQMLKVAAECHLRGLVHRDMKPENFLFKSTEEDSALKATDFGLSDFIKPGKKFHDIVGSAYYVAPEVLKRRSGPESDVWSIGVISYILLCGRRPFWDKTEDGIFKEVLKNKPDFRRKPWPTISNSAKDFVKKLLVKDPRARLTAAQALSHPWVREGGDATEIPIDISVLSNMRQFVKFSRLKQFALRALATTLDEEELADLRDQFGAMDADKNGAISLDEMRQALAKDHPWKLKDARVAEILQAIDSNTDGFVDFEEFVAAALHVNQLEEHDSEKWQQRSRAAFEKFDIDGDGFITAEELRMHTGLKGSIEPLLEEADIDHDGKISLHEFRRLLKTASIKSRNVRNPPGYLISRKA

SEQ ID NO: 55 - DNA, 1632 bp, Brassica napus
atgggtaactgtaacgtctgtgtgagaccccctaaccccgaagaatcgaaaccgaagaaaaccaaccaaaaccggaaattaaacccattcacctccgatttcatcagatcccccgctcgaacccgcgcccccaaggacgcggtaatccccacgagccaccagaccaagatcaccgacaagtacatcctcggccgagagctaggccgcggcgagttcgggatcacctacctctgcaccgaccgcgagtcccgcgaagccctggcctgcaaatcgatctccaagcggaagctccgcaccgccgtcgacgtcgaggacgtccgccgcgaggtctcgatcatgtccacactccccgaccaccccaacgtcgtcaagctcagggcgacttacgaggacggcgagagcgtgcatctggtcatggagctctgcgaaggcggcgagcttttcgacaggatcgtcgcgagggggcattacacggagcgtgcggctgcgggagttgcgaggacgatcgctgaggttgtgatgatgtgtcatgtgaatggagttgtgcatcgtgatttgaagcctgagaactttttgtttgctaacaagaaggagaactctgcgttgaaggctattgattttgggttgtctgtgttcttcaaacctggagaaaagtttaaggagattgtaggaagtccatattacatggctcctgaggtgttgaagagagattatggaccagaggttgatgtttggagtgctggagttatcatctacatcttgctctgtggtgttcctcccttttgggctgagacggaacaaggtgttgctcttgcgatcttgcggggagttattgactttaagagagacccttggcctcagatatcagagagcgccaagagccttgtgaggcagatgttgaatcctgatcccactaagcgtttaactgctcagcaagtgttagctcacccttgggtacagaatgcaaagaaagctccaaatgtaccattaggggatatagtcagatcaagattgaagcagttctctatgatgaatagattcaaaaagaaagttcttcgtgtaatagctgagcacttgtctattcaagaggttgaagtgatcaaggacatgttctcactgatggatgaagacaacgatggtagaataacttacctggagctcaaagctggacttcagaaggttggctcacagcttggtgaaccagagatcaaaatgttgatggaagtggctgatgttgatgggaatgggtttctggactacggagagtttgtagctgtgatcattcacttgcagaagatagagaacgacgagcttttcaaactagctttcatgttctttgacaaagatggaagtacatacatcgaacttgatgagctacgggaagctttaactgacgagttgggcgaacctgatgtcagtgttctaaacgacatcatgcgtgaagttgattctgacaaggatgggcgtataaactatgatgagtttgtgacgatgatgaaagcaggaaccgattggagaaaggcgtcgagacaatactcaagagagaggttcaaaagcttaagcattaacttgatgaaagatggttcattgcatctccatgatgctctcactggacaatctgtccctgtttga

SEQ ID NO: 56 - protein, 543 aa, Brassica napus
MGNCNVCVRPPNPEESKPKKTNQNRKLNPFTSDFIRSPARTRAPKDAVIPTSHQTKITDKYILGRELGRGEFGITYLCTDRESREALACKSISKRKLRTAVDVEDVRREVSIMSTLPDHPNVVKLRATYEDGESVHLVMELCEGGELFDRIVARGHYTERAAAGVARTIAEVVMMCHVNGVVHRDLKPENFLFANKKENSALKAIDFGLSVFFKPGEKFKEIVGSPYYMAPEVLKRDYGPEVDVWSAGVIIYILLCGVPPFWAETEQGVALAILRGVIDFKRDPWPQISESAKSLVRQMLNPDPTKRLTAQQVLAHPWVQNAKKAPNVPLGDIVRSRLKQFSMMNRFKKKVLRVIAEHLSIQEVEVIKDMFSLMDEDNDGRITYLELKAGLQKVGSQLGEPEIKMLMEVADVDGNGFLDYGEFVAVIIHLQKIENDELFKLAFMFFDKDGSTYIELDELREALTDELGEPDVSVLNDIMREVDSDKDGRINYDEFVTMMKAGTDWRKASRQYSRERFKSLSINLMKDGSLHLHDALTGQSVPV

SEQ ID NO: 57 - DNA, 1650 bp, Glycine max
atgggcaacacttgccgcggatctttgaaaggtaaatattctcagggcttgagccagcccgaagaccattcaaagcccaccaccacccattctgatccctcctccgaccacccctctaccaagcaatctgcagaaaactacaacaacaacaactatcttcccttcaacgccaagagagagtccatcatgcgccgcggcctcgacaaccaagcctattatgtcttgggccataagactcccaacattcgtgatctatacactcttggccgtaaattgggacagggccaatttggtaccacttatttatgcaccgagaatgctacctccattgaatatgcctgcaaatccatctccaaaaggaagttgatttccaaggaggacgttgaggacgttaggagggaaattcagataatgcatcatttagctggtcacaagaacattgtcaccatcaagggtgcttatgaggatccactctatgttcatattgtcatggagctttgttccgggggtgagttgtttgatcgcatcatccagaggggccactataccgagaggaaggccgctgacttgaccaaaattattgttggtgttgttgaggcttgccattcccttggggtcatgcatagagatctcaagcctgaaaactttctcttggtcaacaaagatgatgatttctctcttaaagccattgactttggcctctccgttttcttcaaacccggtcaagttttcactgatgtagtcggcagcccatactatgttgctcctgagattctcctcaaacattatgggcctgaagcagatgtgtggacagcgggtgtcatactgtacatattgcttagtggagtgccgccattttgggcagagacccagcagggtatatttgatgcagtattgaagggacttatagattttgactcagatccttggcctctaatatctgacagtgcaaaagatctgattagaaagatgctgtgttctcggccttcagaacggttgactgctcatcaagtgttatgtcatccttggatatgtgaaaatggagttgcccctgacaggtcactggaccctgctgttctttctcgtctcaaacagttttctgctatgaataagctaaagaagatggctctgcgagtgattgctgaaagtctatccgaagaggagattgccggtttgagagaaatgtttcaggctatggatactgataacagtggtgcaatcactttcgatgaactcaaagctggtctaagaagatatgggtctacccttaaggatatagaaatacgtgatcttatggaagcggctgatgtggacaaaagtggaaccatagactatggggagtttattgctgcaacagttcatctcaacaaactagagcgtgaagaacatctcattgcagcattccaatattttgacaaggatggtagtgggtacattacagttgatgaacttcaacaagcttgtgcagaacaaaacatgactgacgcttttcttgaagacatcattagagaagttgatcaagataatgatggaaggattgattatggtgaatttgctgccatgatgcaaaaaggcaacgctggaattggtaggagaactatgcgcaacagtctgaatttaagcatgagagatgcaccaagtgctcaatag

SEQ ID NO: 58 - protein, 549 aa, Glycine max
MGNTCRGSLKGKYSQGLSQPEDHSKPTTTHSDPSSDHPSTKQSAENYNNNNYLPFNAKRESIMRRGLDNQAYYVLGHKTPNIRDLYTLGRKLGQGQFGTTYLCTENSTSIEYACKSISKRKLISKEDVEDVRREIQIMHHLAGHKNIVTIKGAYEDPLYVHIVMELCSGGELFDRIIQRGHYTERKAAELTKIIVGVVEACHSLGVMHRDLKPENFLLVNKDDDFSLKAIDFGLSVFFKPGQVFTDVVGSPYYVAPEVLLKHYGPEADVWTAGVILYILLSGVPPFWAETQQGIFDAVLKGHIDFDSDPWPLISDSAKDLIRKMLCSRPSERLTAHQVLCHPWICENGVAPDRSLDPAVLSRLKQFSAMNKLKKMALRVIAESLSEEEIAGLREMFQAMDTDNSGAITFDELKAGLRRYGSTLKDIEIRDLMEAADVDKSGTIDYGEFIAATFHLNKLEREEHLIAAFQYFDKDGSGYITVDELQQACAEHNMTDAFLEDIIREVDQDNDGRIDYGEFAAMMQKGNAGIGRRTMRNSLNLSMRDAPSAQ

SEQ ID NO: 59 - DNA, 1635 bp, Zea mays
atggggaaccaatgcccaaacgggacccttgggagtgactactacaaccgcccgacgtccaggttcgctgatggttgtcttgaggacgatcgctactctgacttgaagaagtttgacaagccatggcctgaggtgaactcgtttaagcccactgctgttggtattttgaagaggggattggatccaacgtcaatcactgtccttgaaaggaagacggccgacataagggaacattatatcattggtcggaggcttggtcaaggccagtttggcacaacattcctctgcaccgagatcagtacagggtgtgagtatgcatgcaagacaatcccaaagcgaaagctcatcaccaaggaggatgttgaggatgtgcgccgtgagatccagataatgcaccatttgtcaggccacaagaatgttgtttccatcaaggatgtatacgaggatgggcaggcggtgtatattgtgatggagctctgcgccggtggggagctctttgatcgaattcaggagaaagggcattatagcgaacagaaggctgcagagctcataagaatcattattagccttgtggctatgtgccattcacttggggttatgcaccgtgatctaaagccagaaaacttcctcctttgggataaagaagatgacctgtcaataaaagcaatcgattttggtctatctgtgttcttcaaaccaggtcaggttttcactgagctggttggaagtccatactacgttgctcctgaggtactacacaaacggtatggaccagaagcggatgtgtggtcagctggagtgatactgtatgttttgcttagtggggtgccacctttttgggcagagacgcaacaaggtatatttgatgctgtcttgaaggggcacattgattttgactcggacccatggcctaagatatctgaaagcgcaaagaatctcataaggaagatgctctgcccttgtccttcagagcgtctgaaagcccatgaagtactacgccatccttggatctgtgaaaatggagtggctactgatcaggctcttgatcccggtgttctctctcgtctcaaacaattctccacaatgaacaaattaaagaagttggctctgagagtgatagctgaacgactttctgaggaggagattgctgggttaagacaaatgttcaaggcagttgacgttcaaaatagaggcgtaattacttttggtgaacttagacaaggtttaaaaagatatggtagcgaattggagaatagagaaattagtgatataatggaagtggctgataatgacaataatgtgaccatcaattatgaagaatttatcgctgcaactgtgcctcttaacaaaatagaacgtgaggagcacctgatggcagcttttacctacttcgacaaagatggaagtggttatatcacagttgacaagctgcaacgagcttgtggagaacatgacatggatgacactttccttgaagagataattttagaagttgaccaaaacaatgacggtcagattgactacgccaaattcgtagccatgatgcaaggcagcaaagttggacttgggtggcaacaaatggaaaccactctgaatgtaaccttgagagatgcacctcaagtacactgtcactga

SEQ ID NO: 60 - protein, 544 aa, Zea mays
MGNQCPNGTLGSDYYNRPTSRFADGCLEDDRYSDLKKFDKPWPEVNSFKPTAVGILKRGLDPTSITVLERKTADIREHYIIGRRLGQGQFGTTFLCTEISTGCEYACKTIPKRKLITKEDVEDVRREIQIMHHLSGHKNVVSIKDVYEDGQAVYIVMELCAGGELFDRIQEKGHYSEQKAAELIRIIISLVAMCHSLGVMHRDLKPENFLLWDKEDDLSIKAIDFGLSVFFKPGQVFTELVGSPYYVAPEVLHKRYGPEADVWSAGVILYVLLSGVPPFWAETQQGIFDAVLKGHIDFDSDPWPKISESAKNLIRKMLCPCPSERLKAHEVLRHPWICENGVATDQALDPGVLSRLKQFSTMNKLKKLALRVIAERLSEEEIAGLRQMFKAVDVQNRGVITFGELRQGLKRYGSELENREISDIMEVADNDNNVTINYEEFIAATVPLNKIEREEHLMAAFTYFDKDGSGYITVDKLQRACGEHDMDDTFLEEIILEVDQNNDGQIDYAKFVAMMQGSKVGLGWQQMETTLNVTLRDAPQVHCH

SEQ ID NO: 61 - DNA, 1605 bp, Physcomitrella patens
atggggaacacaagcgcaaggcctagggatggccgcaaacataaagcaagccaggggaacgatagcgtgcaaccaaagagccaccagggaagcagccatggcgatagcggtcatcctgggggtagccatcggggaggtagctacggtgggagtcaatctcgtcatgtgccgaaaatgaaatcatcttcaacagggatcttgggtaaacccctaagggatattaaactacactatactttgggccgggagcttggccgaggccagtttggggtgacctacttgtgtaccgacaaagagaccggaatttcatacgcctgtaaaaccatagccaagcggaagctaaccaacaaggatgatatcgaggatgtcaagcgggaggttcagattatgcatcacctgtcggggacccctaacatcgtggaattgaaggatgtgtttgaggacaagcagaatgtgaatctcgtaatggagctctgtgcaggtggggagctctttgatcgcatcattgcgaaggggcattacagtgagcgagacgctgccgatatgtgcagggtcattgtaaccgtagtgcacagatgccactccttgggggtattccaccgggatcttaagccagagaacttcttgttagccagcaaggataagaatgcaccactgaaggccacggattttggtctgtcaattttcttcaagcccggggatgagttccacgacattgttggaagtgcgtactatgtggctccggaggtcttgaagaggagctacgggcccgaagctgacgtttggagcgcaggtgtgatagtgtacattctgttgtgtggggtcccaccgttctgggccgagacagagaaagaaattttcgatacgatcatgcgagggcacattgacttcaagagcgacccatggccgaagatctcggacgaggcgaaggatctggtgaagaaaatgttgaactctaatgtgaaggagcgtctgactgcacaggaggtgttgaaccatccatggatgcagagggacggtgttcccgacgtaccactagacaatgcggtgttgactagactgaggaacttttcagctgcaaacaagatgaagaagctggctttgaaggtgatagcagacaacttgtcggaggaagagatcgtagggttgagagaattgttcaaatccatagataccgataacagcggtaccgtcacgattgatgagttgaagaaaggattgttaaagcagggcactaggctcactgaagcggacgttaggaagttgatggaagctgctgacgtcgacgggaatggaaagatagatttcaacgagttcatatcggcaacgatgcacatgaacaagacccagaaagaggatcaccttcacgccgcattccagcactttgatacggacaacagtggatatattactatatatgagctgcaagaagcaatggagaagcaagggatgggagaccccgagacacttcaagagatcatcaacgaggtggacacagaccacgacggaagaatagactacgacgagttcgtagccatgatgcggaaaggcaatcctggaacagaagacggcggaaacctgaagagtcccagacacaggtggtag

SEQ ID NO: 62 - protein, 534 aa, Physcomitrella patens
MGNTSARPRDGRKHKASQGNDSVQPKSHQGSSHGDSGHPGGSHRGGSYGGSQSRHVPKMKSSSTGILGKPLRDIKLHYTLGRELGRGQFGVTYLCTDKETGISYACKTIAKRKLTNKDDIEDVKREVQIMHHLSGTPNIVELKDVFEDKQNVNLVMELCAGGELFDRIIAKGHYSERDAADMCRVIVTVVHRCHSLGVFHRDLKPENFLLASKDKNAPLKATDFGLSIFFKPGDEFHDIVGSAYYVAPEVLKRSYGPEADVWSAGVIVYILLCGVPPFWAETEKEIFDTIMRGHIDFKSDPWPKISDEAKDLVKKMLNSNVKERLTAQEVLNHPWMQRDGVPDVPLDNAVLTRLRNFSAANKMKKLALKVIADNLSEEEIVGLRELFKSIDTDNSGTVTIDELKKGLLKQGTRLTEADVRKLMEAADVDGNGKIDFNEFISATMHMNKTQKEDHLHAAFQHFDTDNSGYITIYELQEAMEKQGMGDPETLQEIINEVDTDHDGRIDYDEFVAMMRKGNPGTEDGGNLKSPRHRW

SEQ ID NO: 63 - DNA, 1650 bp, Brassica napus
atgggcaattcatgccgtggttctttcaaggacaaaacctacgagggcaataacaacaacctgcccgaggagaattccatcaccatcacccacgattcctccgttcattccccgaccacagaacaagacttccctaaagaagacaacaacaacaacaacaagagtcctgttcttgtgcttcccgtgaaagaaccttttatgcgacgtaacatggacaaccaagcttactacgttctcggtcacaagactcctaacatccgtgatctttacaccttgagccgtaagttaggacaaggacagttcgggaccacgtatctctgcaccgaggtcgcaacgggtgttgactatgcttgcaagtctatatccaagaggaagttgatatctaaggaagatgttgaggatgttaggagggagattcagataatgcaccatttggctggtcacaagaacattgttacgataaaaggagcttatgaggaccctttgtatgttcacattgtgatggaggtttgtgctggtggtgagttgtttgataggattattcagagaggtcattacaccgagaggaaagctgctgagttgaccaagattgttgttggtgttgttgaggcgtgtcattcgcttggtgtcatgcatagagacttgaagcctgagaatttcttgttggttaataaggatgatgatttctctcttaaggccattgattttggtctctctgttttcttcaaaccaggccaaatatttaaggatgttgttggaagtccatactatgttgctcctgaggttcttcttaaacattatggtcctgaagctgatgtgtggactgctggtgttatactatatattctactaagtggtgtccctcctttttgggcagaaacacaacaaggaatatttgatgctgtcttgaaaggagatatagactttgagtcagatccgtggcctgtgatttccgacagtgctaaagatctgatcaggaagatgttatgctctaatccctctgaacgcttgacagctcatgaagtcatgcgtcatccatggatctgcgagaacggagttgcaccagacagagctcttgatcctgctgttctgtctcgtctcaaacagttttctgcaatgaataaattaaagaagatggctttaaaggtgatagctgagagtctctcagaagaagaaattgcaggtttaagagcaatgtttgaggcaatggatacagataacagcggtgcaatcacttttgatgaacttaaagctggtctgagaagatatggctctactttgaaagacactgagatccaagatcttatggaagcggctgatgtggataacagcggtacaatagattacagtgagttcattgcagcgaccatccatctgaataagctagacagagaagagcatcttgtctctgcgtttcagtactttgataaagatggaagtggttacatcaccattgatgagctgcaacaatcttgcgtggaacatgggatgaccgatgtttttcttgaagatgtaatcaaagaagttgatcaagacaatgatggacggattgactatggagaatttgttgcaatgatgcaaaagggaaatgctggtatcgggaggcgaacaatgagaaatagcctgaacatcagcatgagagatgcttag

SEQ ID NO: 64 - protein, 549 aa, Brassica napus
MGNSCRGSFKDKTYEGNNNNLPEENSITITHDSSVHSPTTEQDFPKEDNNNNNKSPVLVLPVKEPFMRRNMDNQAYYVLGHKTPNIRDLYTLSRKLGQGQFGTTYLCTEVATGVDYACKSISKRKLISKEDVEDVRREIQIMHHLAGHKNIVTIKGAYEDPLYVHIVMEVCAGGELFDRIIQRGHYTERKAAELTKIVVGVVEACHSLGVMHRDLKPENFLLVNKDDDFSLKAIDFGLSVFFKPGQIFKDVVGSPYYVAPEVLLKHYGPEADVWTAGVILYILLSGVPPFWAETQQGIFDAVLKGDIDFESDPWPVISDSAKDLIRKMLCSNPSERLTAHEVMRHPWICENGVAPDRALDPAVLSRLKQFSAMNKLKKMALKVIAESLSEEEIAGLRAMFEAMDTDNSGAITFDELKAGLRRYGSTLKDTEIQDLMEAADVDNSGTIDYSEFIAATIHLNKLDREEHLVSAFQYFDKDGSGYITIDELQQSCVEHGMTDVFLEDVIKEVDQDNDGRIDYGEFVAMMQKGNAGIGRRTMRNSLNISMRDA

SEQ ID NO: 65 - DNA, 1599 bp, Brassica napus
atggggaactgttgcggcagtccaagttcagccaccatcgagagtggacatggcaaacccaagaacaaaaacaatccctttcacagcaacgaagcaaacggatctggagctggcttcaagctctctgtgctgaaagatccaacaggacacgacatatcttctcagtatgatcttggacgcgaggttggtcgaggggagtttggtgtgacttacttgtgtactgacatccaaacgggtgacaagtacgcttgcaagtccatatcgaagaagaagctgaggacagcggtggatataggggatgttaggagggaggttgagataatgagacatatgcctaaacacccaaacattgtctctttgaaggattcgttcgaggatgatgacgcggttcatatagttatggagttgtgtgaaggaggggagctgtttgatcggattgttgcgagagggcattacactgagagggctgctgctgcggttatgaagactattgttgaagttgttcagatatgtcataagcagggagtgatgcatagggatcttaaaccagagaactttctttttgctaataagaaagagacatcagctcttaaggctattgattttggattatctgtcttctttaaaccaggtgagcagtttaatgagattgtgggaagtccttattacatggcaccagaggtgctaagacgaaactatggacctgagatcgatgtctggagtgcaggagtcatcctctatatccttctttgtggtgtccctcctttttgggcagagactgagcaaggggtggctcaagcgatcattaggtcagtaattgactttaagagagatccatggccaagagtttccgaaagcgccaaggaccttgtgagaaagatgcttgaacctgatcccaagaaacggctttctgctgcagaagtactcgaacatacttggatactgaatgcaaagaaggctccgaatgtgtctcttggggagactgtgaaagcaaggctaaagcagttttctgttatgaacaagctcaagaaacgagctctacgagtgatagctgaacacttgtcagtggaggaagcagctgggataaaggaagcatttgaaatgatggacgttaacaagagaggcaagataaacctcgaggagcttaagtacggacttcaaaaagctggacagcagattgctgatgctgatcttcagattcttatggaagctactgatgttgatggggacgggacactgaactatggagagttcgtggctgtatcagtgcacttgaagaagatggcgaacgatgaacacttgcataaagcgttcaacttctttgataagaaccagagtggttacatagagcctgaagagcttcgtgaggctttgaatgatgaattggatgaaactagcagtgaggaagtcatcgctgccatcatgcatgatgttgatactgacaaggacgggcgaataagctatgaagagtttgcagcgatgatgaaagctgggacagactggaggaaagcgtcacggcagtattcgagggaaagattcaacagtttgagcctcaagttaatgagagatggttctttgcaattagaaggcgagacctga

SEQ ID NO: 66 - protein, 532 aa, Brassica napus
MGNCCGSPSSATIESGHGKPKNKNNPFHSNEANGSGAGFKLSVLKDPTGHDISSQYDLGREVGRGEFGVTYLCTDIQTGDKYACKSISKKKLRTAVDIGDVRREVEIMRHMPKHPNIVSLKDSFEDDDAVHIVMELCEGGELFDRIVARGHYTERAAAAVMKTIVEVVQICHKQGVMHRDLKPENFLFANKKETSALKAIDFGLSVFFKPGEQFNEIVGSPYYMAPEVLRRNYGPEIDVWSAGVILYILLCGVPPFWAETEQGVAQAIIRSVIDFKRDPWPRVSESAKDLVRKMLEPDPKKRLSAAEVLEHTWILNAKKAPNVSLGETVKARLKQFSVMNKLKKRALRVIAEHLSVEEAAGIKEAFEMMDVNKRGKINLEELKYGLQKAGQQIADADLQILMEATDVDGDGTLNYGEFVAVSVHLKKMANDEHLHKAFNFFDKNQSGYIEPEELREALNDELDETSSEEVIAAIMHDVDTDKDGRISYEEFAAMMKAGTDWRKASRQYSRERFNSLSLKLMRDGSLQLEGET

SEQ ID NO: 67 - DNA, 1578 bp, Brassica napus
atgggaaactgctgctctaacggacgtgactcaggcgacaacggagacacgcgcggcataaccgcttcaaacgctggtccaactgccgaagcctccgtgccacaatccaaacacgcccctccttctcctcctcccgcaaccaaacaaggccccataggacctgtcttaggccgtcccatggaagatgtaaaatcctcatactctctaggcaaagagctaggccgaggacagttcggcgtcacgcatctctgcactcagaaggcgacaggtcagcagttcgcttgcaagaccattgccaaaaggaagcttgtgaacaaagaagatattgaggatgtaagaagggaagtgcagataatgcatcacctgactggtcagcctaacattgtggagcttaaaggagcttacgaggataagcattctgtgcatttggtcatggagctttgcgctggtggagagctgttcgataggattattgctaaaggacattactcggagagagcagctgcttccttgttgagaacgattgttcagattgtgcatacttgtcattccatgggggttattcacagggacttgaagcctgagaactttttgttgctcagcaaagatgagaaggctcctctcaaggccactgactttgggctgtctgtattctacaagccgggagaggtgtttaaggatattgtgggtagtgcttattacatagcgcctgaggttttgaaaaggaagtatggaccagaagctgatatttggagtattggtgtcatgttgtatatcctcttatgtggtgtccctcccttctgggctgaatcggagaatgggatattcaacgccatcttaaagagccatgttgatttctcaagtgatccatggccatccatctcacctcaggcgaaggatcttgttaagaagatgctcaactctgatcccaagcaaaggctaactgctgctcaagttctcaatcatccatggatcaaggaagatggagaagcaccagatgttcctcttgacaatgcggtgatgtccaggctcaagcaattcaaagcaatgaacaatttcaagaaagttgcattgagggtgatagcaggctgcttatcagaggaagagatcatggggttgaaggagatgtttaaaggtatggacactgacaacagtggaacgattacactcgaggagctaagacagggactcgctaagcaaggtacaaggttgtcagagtacgaagtccagcaactaatggaagctgccgatgctgatggtaatggaacaatagactatggtgagtttatcgcagccacaatgcatatcaacagacttgacagagaagaacatctctactcagccttccaacactttgacaaagacaacagcggatatattactatggaagagctggaacaagccctccgggagtttgggatgaacgatggcagagacattaaagagataatttcagaggtcgatggagacaatgatggtcggataaactacgacgagttcgtggcaatgatgagaaaaggaaaccctgatcctatcccaaagaagcgacgtgagctttcatttaaatggccagagtag

SEQ ID NO: 68 - protein, 525 aa, Brassica napus
MGNCCSNGRDSGDNGDTRGITASNAGPTAEASVPQSKHAPPSPPPATKQGPIGPVLGRPMEDVKSSYSLGKELGRGQFGVTHLCTQKATGQQFACKTIAKRKLVNKEDIEDVRREVQIMHHLTGQPNIVELKGAYEDKHSVHLVMELCAGGELFDRIIAKGHYSERAAASLLRTIVQIVHTCHSMGVIHRDLKPENFLLLSKDEKAPLKATDFGLSVFYKPGEVFKDIVGSAYYIAPEVLKRKYGPEADIWSIGVMLYILLCGVPPFWAESENGIFNAILKSHVDFSSDPWPSISPQAKDLVKKMLNSDPKQRLTAAQVLNHPWIKEDGEAPDVPLDNAVMSRLKQFKAMNNFKKVALRVIAGCLSEEEIMGLKEMFKGMDTDNSGTITLEELRQGLAKQGTRLSEYEVQQLMEAADADGNGTIDYGEFIAATMHINRLDREEHLYSAFQHFDKDNSGYITMEELEQALREFGMNDGRDIKEIISEVDGDNDGRINYDEFVAMMRKGNPDPIPKKRRELSFKWPE

SEQ ID NO: 69 - DNA, 1647 bp, Triticum aestivum
atgggtaatcagaatgggacccctgggaatgattactgcagccggttccccagggagcatcctgcttccaggtacgccgatgggattgaagatgatagctactcagacttgaagaaatccgagaagccctggcccgatgccgactcgtttaagcccaccgccgctggtattctgaggcagggtttggatctgacatccatctctgtcctcgggcgcaagacggcggacctaagggagcattatatcattggccggaagcttgggcagggccagtttgggacgacatacctctgcaccgagataagtacagggtgcgacttcgcatgcaagaccatcctcaagcgcaagctcgtcaccaaggtggatgtcgaggatgtgcgccgtgagatccagataatgcaccatttgtcgggacacaagaacgttgtctcgatcaaggatgtctatgaggacgtgcaggcggtccacattgtgatggagctcttgcccggcggggagctctttgaccgaattcaggggaatgggcattacagcgagatgaaggctgcagagattacaagaattgttgtcagcattgtggctatgtgccattcacttggtgtgatgcaccgcgatctcaagccagaaaatttcctcctccttgacaaagatgatgacctgtccataaaagcaattgattttggcctatccgtttacttcaagccaggccaggttttcagtgagctagttggcagcccgttctatgttgctcctgaggtgctgcacaaacgctatgggccagaatctgatgtgtggtcagctggagtgatactctatgtgttgctaagtggggttccaccattttgggcagatacacagaaaggcatatttgatgcagttctgaaggggcaccttgatttggaatcagacccttggcctaagatatctgacggtgcaaaggatcttataagaaaaatgctttgcaattgcccttcagagcgtttgaaagcccatgaagtgctacggcatccctggatctgccaaaatggggtggccactgatggagttttggatcctagtgtcatctctcggctcaagcggttctctgcaatgaacaatctacagaaattagctctgagagtgatagctgagcgtctttcagaagaggagattgctggattaagagaattattcaagacagtggacataaaaaatagaggtgtgatcactttcggtgagcttaggaaaggtttgacaagatatggcaacgaattggtggataccgagatttgtgatataatggaagcggctgatacagacactgatgtaaccataaattatgaagaatttattgctgcaaccatgcctctaaacaagatagagcgggaagagcacttgaaggcagcttttacatattttgacaaagatggcagtggctatatcacagtcgacaagcttcaacgagcctgtgcagaatataacatggagggcactctccttgaagagattattttagaggccgaccagaacaatgacggtcaaattgattatgctgaatttgtagccatgatgcaaggcaacaccaacggtggcaatattggacttgggcgtccaacaatggaaaccagtctgaatgtgaccttgagagatgcagctcaagtacattaa

SEQ ID NO: 70 - protein, 548 aa, Triticum aestivum
MGNQNGTPGNDYCSRFPREHPASRYADGIEDDSYSDLKKSEKPWPDADSFKPTAAGILRQGLDLTSISVLGRKTADLREHYIIGRKLGQGQFGTTYLCTEISTGCDFACKTILKRKLVTKVDVEDVRREIQIMHHLSGHKNVVSIKDVYEDVQAVHIVMELLPGGELFDRIQGNGHYSEMKAAEITRIVVSIVAMCHSLGVMHRDLKPENFLLLDKDDDLSIKAIDFGLSVYFKPGQVFSELVGSPFYVAPEVLHKRYGPESDVWSAGVILYVLLSGVPPFWADTQKGIFDAVLKGHLDLESDPWPKISDGAKDLIRKMLCNCPSERLKAHEVLRHPWICQNGVATDGVLDPSVISRLKRFSAMNNLQKLALRVIAERLSEEEIAGLRELFKTVDIKNRGVITFGELRKGLTRYGNELVDTEICDIMEAADTDTDVTINYEEFIAATMPLNKIEREEHLKAAFTYFDKDGSGYITVDKLQRACAEYNMEGTLLEEIILEADQNNDGQIDYAEFVAMMQGNTNGGNIGLGRPTMETSLNVTLRDAAQVH

SEQ ID NO: 71 - DNA, 1596 bp, Zea mays
atggggcagtgttacagcagagctacggccccggactctggacggggaggtgccaatggttatggctattctaaccaggcaaagccggcgcaagcacccccgagttacaaccctcctcagcaggcggccgaggtgaggtacacaccatcggcgacgaactcttcggcagtcccacccgtggctgtgccgccgaagccaacggcggacacgattcttggcaagcagtacgaggacgtgcgctctgtctactccctcgggaaggagcttggccggggccagttcggggtgacatacctctgcacagagattgcctctggtaggcagtacgcctgcaagtccatctccaagcgcaagctcgtcagcaaggcagacagggaggacattcgaagggagatccagatcatgcagcacctgtctgggcagccaaacattgttgagttccggggagcatacgaggacaagagcaatgtccatgtggtgatggagctctgcgcaggtggggagctcttcgatcgcatcattgccaaggggcactacacagagcgtgcagctgctacaatctgcagagcagttgtgaatgttgtcaacatttgccacttcatgggtgtgatgcaccgtgacctgaaaccggagaacttcttgcttgcgagcaaggaggagaatgcaatgctcaaggccactgattttgggctttccgtcttcatcgaagaaggaaagatgtacagggacatcgttggaagtgcttattatgttgcgcctgaagtccttaagcggagctatggaaaagagatagatgtttggagcgcaggtgttattttgtacattcttctcagtggtgtgcctccattttgggctgaaactgaaaaggggatatttgatgctattctgcatgaggagattgactttgaaagtcaaccttggccatcaatttctgagagtgctaaagacttggttagaaagatgttgacacgagatccaaagaaaagactgacttcagctcaagttcttcaacattcatggctcagagaaggtggaggtgcatctgataagcctatcgacagtactgttctttctagaatgaagcagttcagagcaatgaataagctgaaaaagatggccctaaaggttattgcctcaaaccttaacgaggaagagatcaaggggctaaagcaaatgttcatgaacatggacacagacaatagtggcacaatcacgtatgaagaactcaaagcaggactagccaaacttggatcaaagctgtcggaagctgaagtaaagcagttgatggaggctgctgatgttgatgggaatggatccatcgactatgttgagttcatcactgccacaatgcatagacacaagctcgaaagagacgagtatttgtttaaggcattccagtacttcgataaagataacagcggtttcatcacaagagatgagctggagtctgctttgatcgagcatgagatgggtgacacgagtacaataaaggagatcatatcagaagtggacacagacaatgatgggaggattaactatgaggagttctgcgcaatgatgagaggagggatgcagcagccaatgaggctcaagtag

SEQ ID NO: 72 - protein, 531 aa, Zea mays
MGQCYSRATAPDSGRGGANGYGYSNQAKPAQAPPSYNPPQQAAEVRYTPSATNSSAVPPVAVPPKPTADTILGKQYEDVRSVYSLGKELGRGQFGVTYLCTEIASGRQYACKSISKRKLVSKADREDIRREIQIMQHLSGQPNIVEFRGAYEDKSNVHVVMELCAGGELFDRIIAKGHYTERAAATICRAVVNVVNICHFMGVMHRDLKPENFLLASKEENAMLKATDFGLSVFIEEGKMYRDIVGSAYYVAPEVLKRSYGKEIDVWSAGVILYILLSGVPPFWAETEKGIFDAILHEEIDFESQPWPSISESAKDLVRKMLTRDPKKRLTSAQVLQHSWLREGGGASDKPIDSTVLSRMKQFRAMNKLKKMALKVIASNLNEEEIKGLKQMFMNMDTDNSGTITYEELKAGLAKLGSKLSEAEVKQLMEAADVDGNGSIDYVEFITATMHRHKLERDEYLFKAFQYFDKDNSGFITRDELESALIEHEMGDTSTIKEIISEVDTDNDGRINYEEFCAMMRGGMQQPMRLK

SEQ ID NO: 73 - DNA, 1068 bp, Brassica napus
atggctttagaagaagaggaagagattcaaaacgcaccgttttgtatgcttttctgtgaggaagacagttctgggttcgatgaggaagacgaagattcctgcgacgacaaatctgacgaaaagtttccatttttccatctgggttttctcgatcggtgtatgtcctgggaggaagacgagttatcgagtctgatctccaaggaaaacgagttcagaccgtctcttaccgaagagggtgtcttagacgacgagtatctggctttgtgtcgtgaaaaggctgttgattggattctcagggtgaaatctcattacgggtttagttccttgacggctcttctcgctgttaactacttcgataggttcatcacaagcaggaagtttcagacagagtttccgtggatgtctcagcttacggctttggcttgtttgtctttagctgcaaaagttgaagaggtccgagttcctctgctcgtagatctccaagtggaagaggcaagctatgtctttgaggctaaaaccatacagcgaatggagcttttgattctctctactcttcattggagggtgcatcccgtgactccaatctcgtatcttgatcatattatccgtcgattcagctttaaatctcaccagcaattggagtttttgagtagatgtgaatctctgttgctctccattgttcctgattcgaggtttctaagttatagctcgtctgagttagcagctgcaataatggtctctgtctttagaggtttcaagacgtgtgacgaatctgaatacgaatctcagctcatgacactactcagagttgattcggagaaagtacataaatgctatgagttggtgtttgaccacattccaagcacgaagaggatgcaacaaccccctagtccaaccggtgtattcgatgcatcattcagctttgatagctctaacgagtcatgggttgtgtctgcatcaccgtctccagagcctctattcaagaggagaagagtgcaagagcagcagatgaagttgtcttcagtaaacagagtctttctcgatgtgttctctagtagtcctcgctaa

SEQ ID NO: 74 - protein, 355 aa, Brassica napus
MALEEEEEIQNAPFCMLFCEEDSSGFDEEDEDSCDDKSDEKFPFFHLGFLDRCMSWEEDELSSLISKENEFRPSLTEEGVLDDEYLALCREKAVDWILRVKSHYGFSSLTALLAVNYFDRFITSRKFQTEFPWMSQLTALACLSLAAKVEEVRVPLLVDLQVEEASYVFEAKTIQRMELLILSTLHWRVHPVTPISYLDHIIRRFSFKSHQQLEFLSRCESLLLSIVPDSRFLSYSSSELAAAIMVSVFRGFKTCDESEYESQLMTLLRVDSEKVHKCYELVFDHIPSTKRMQQPPSPTGVFDASFSFDSSNESWVVSASPSPEPLFKRRRVQEQQMKLSSVNRVFLDVFSSSPR

SEQ ID NO: 75 - DNA, 1083 bp, Glycine max
atgaatgcggaacctccgctgccgccggcgctcctcatgtcggtttcctgcctctccgactacgacctcctctgtggcgaggacacctccggagtcctctccggagagtcgccggagtgctcctcatccgacatcggctcctcaccacttccgccgtcacctccgccgtcgccgacgatgacggaggattgttattccatcgcgagcttcatcgagcacgagcgcaacttcgtccccggattcgagtacctgtcgaggttccaatctcgctccctcgacgccaacgccagagaagaatccgttgcatggattctcaaggtacacgcgtattatggctttcagcctttgacggcgtacctcgccgtcaactatatggatcggtttttggattctagccagttgccggaaacaaatgggtggcctctgcaacttctatctgttgcatgcttgtctttggcagcaaaaatggaggaacctcttgttccatctctcttggaccttcagatagaaggtgccaagtacatatttgagccgagaacaattcgtaggatggagctacttgttctgggtgtcttggattggaggctaagatcagtaaccccactttgcttcctcgctttctttgcgtgcaaagtagattcaactggaacttttatccggttcctcatttccagggcaacagaaatcatcgtatctaatatccaagaggctagctttcttgcttactggccatcatgcattgctgctgcagccatactcactgcagctaatgaaattcctaattggtctgtggttaagcccgaaaatgctgagtcatggtgcgagggactaagaaaagaaaaagtaatagggtgctaccagttgatgcaagagcttgtgattaacaataaccaacggaaactccctactaaagtgttgccgcagctgcgagtaacaactcggacccgaatgaggtcaagtactgtctcatcattctcatcaacatcatcatcatcctcttcaacctccttctccttgtcttgtaagaggaggaaattaaataatcgtttgtgggtagatgatgagaaaggaaactccgagtaa

SEQ ID NO: 76 - protein, 360 aa, Glycine max
MNAEPPLPPALLMSVSCLSDYDLLCGEDTSGVLSGESPECSSSDIGSSPLPPSPPPSPTMTEDCYSIASFIEHERNFVPGFEYLSRFQSRSLDANAREESVAWILKVHAYYGFQPLTAYLAVNYMDRFLDSSQLPETNGWPLQLLSVACLSLAAKMEEPLVPSLLDLQIEGAKYIFEPRTIRRMELLVLGVLDWRLRSVTPLCFLAFFACKVDSTGTFIRFLISRATEIIVSNIQEASFLAYWPSCIAAAAILTAANEIPNWSVVKPENAESWCEGLRKEKVIGCYQLMQELVINNNQRKLPTKVLPQLRVTTRTRMRSSTVSSFSSTSSSSSSTSFSLSCKRRKLNNRLWVDDEKGNSE

SEQ ID NO: 77 - DNA, 1200 bp, Glycine max
atggcaattcagcaccacaatgaccaactagagcataatgaaaatgtctcatctgtccttgatgccctttactgtgacgaaggaaagtgggaagaggaagaggaggagaaagaagaagaagaagatgaaggtgaaaatgaaagtgaagtgacaacaaacactgcaacttgtcttttccctctgctcttgttggagcaagacttgttctgggaagatgaggaactaaactctatcttttccaaagagaaggttcaacatgaagaagcctatggctataacaatctgaacagtgatgatgataataacaacaacaacaatactagtaataataatgtgcatttggactcttgtctctctcagcctcgtcgtgaggcagtggaatggatgctgaaagtcaatgctcactatggattctctgctctcactgcaacactggccgttacttatctggataggttccttctaagcttccattttcaaagggagaagccatggatgatccagcttgtggctgtcacttgcatctctttggctgcaaaagttgaagaaactcaagtgcctcttctcttggaccttcaagtgcaagacacaaagtatgtgtttgaggcaaagactattcagagaatggagctcctggtgctgtccaccctcaaatggaagatgcaccccgtgacccctctctcctttctagatcacattataagaaggcttggattgaaaacacatcttcactgggagtttctcaggcgctgtgagcatcttcttttgtctgtgcttttagattcaagatttgttggttgtcttccttctgtgttggccactgcaacaatgctgcatgttatagaccagattaaacacaatggtgggatggaatacaaaaatcagcttctgagtgttctcaaaattagcaaggagaaagtagatgagtgttataatgccattctccaactctcaaatgtcaataattatggtcataacaacaacactagcaagcgcaagtatgagcaaatcccaagcagcccaagtggcgttattgatgctgcattttgctctgatggttccaacgattcgtgggcagtggggtcatcattatattcaccaccagagcctctcttcaagaagagcagaacccaaggacaacaaatgaaattgtcaccacttaaccgggtcattgtcggaattgttggcacctctccttaa

SEQ ID NO: 78 - protein, 399 aa, Glycine max
MAIQHHNDQLEHNENVSSVLDALYCDEGKWEEEEEEKEEEEDEGENESEVTTNTATCLFPLLLLEQDLFWEDEELNSIFSKEKVQHEEAYGYNNLNSDDDNNNNNNTSNNNVHLDSCLSQPRREAVEWMLKVNAHYGFSALTATLAVTYLDRFLLSFHFQREKPWMIQLVAVTCISLAAKVEETQVPLLLDLQVQDTKYVFEAKTIQRMELLVLSTLKWKMHPVTPLSFLDHIIRRLGLKTHLHWEFLRRCEHLLLSVLLDSRFVGCLPSVLATATMLHVIDQIKHNGGMEYKNQLLSVLKISKEKVDECYNAILQLSNVNNYGHNNNTSKRKYEQIPSSPSGVIDAAFCSDGSNDSWAVGSSLYSPPEPLFKKSRTQGQQMKLSPLNRVIVGIVGTSP

SEQ ID NO: 79 - DNA, 1038 bp, Zea mays
atgggaatcctctgcctcggtgcttcctccacactgctctgcggggaggacaggaacaacgtactcggcctcggctgcggcaacgagctggtggaggtggggagcggccatgacggcttggactccgtcgtcggcgccgtgttccccgtggacacagatgaggccgtgcgggcgttgttggagaaggagacggaccacaagcctcaagacggctatgcggagaggctggagcgcggcggattggagtactcctggaggagagacgccatggattggatttgcaaggtccattcgtactacaggtttggaccactcagtctttaccttgctgtgaattacctggatagattcctctcctcatatgatctcccacacgataagccttggatgcgacagttgttgtcagttgcttgcctagcactcgctgtcaagatggaggagaccgtgctccctcttcctgtggaccttcaggtctgcgatgtgaaatttgagttcgaagcaaggactattgggaggatggagcttcttgtgctggccaccctgaaatggagaatgcaggctgtgacccccttcactttcatcagctacttcctcgacaagttcaatggtgggaagccgccgagtttggcactagcgtcacggtgcaccgatatcataattggcacactcaaaggctctacattcttgtcattcagaccatctgagattgccgcggcctcagctctagcagcagtttttgagaatcaggttgttggctcctcgagtgctctttcagcatctgaagtccctataaataaggtgatgattgctagatgctatgagctgttgcaagagcaagcgctggtgaggaagacagggcacgtcaatggaagcccttcagtgccgcagagcccgattggcgtgctggatgcaacatgcttcagctttaggagtgaagatgcaagactagtatcatcgcaatcaaacaacatcagtagtagtagtagtaacgacaatcaagtttctaagaggagaaggctaagcatatcaccaatttga

SEQ ID NO: 80 - protein, 345 aa, Zea mays
MGILCLGASSTLLCGEDRNNVLGLGCGNELVEVGSGHDGLDSVVGAVFPVDTDEAVRALLEKETDHKPQDGYAERLERGGLEYSWRRDAMDWICKVHSYYRFGPLSLYLAVNYLDRFLSSYDLPHDKPWMRQLLSVACLALAVKMEETVLPLPVDLQVCDVKFEFEARTIGRMELLVLATLKWRMQAVTPFTFISYFLDKFNGGKPPSLALASRCTDIIIGTLKGSTFLSFRPSEIAAASALAAVFENQVVGSSSALSASEVPINKVMIARCYELLQEQALVRKTGHVNGSPSVPQSPIGVLDATCFSFRSEDARLVSSQSNNISSSSSNDNQVSKRRRLSISPI

SEQ ID NO: 81 - DNA, 1095 bp, Physcomitrella patens
atcccgggggcaccaggttgcgatggatcatctggacattcccggcatgcacgaccacgaccggtacgaactcgtgaaggacattgggtcgggcaattttggggtcgccaggctcatgcgtgacaagaagacgcgagagctcgttgcggtgaagtacatcgagcgtggggagaagattgacgagaatgttcagcgggagattattaatcatcggtcgttgcggcatcccaacatagtgcggttcaaggaggttctgttgacaccaactcatttagccatcgtgatggagtatgctgctggtggagaactgttcgagcgaatttgtaatgcaggtcggttcagtgaagatgaggccagatttttctttcagcagcttatttctggagtgagctactgccactccatgcaaatttgccatcgtgatttgaaattggaaaacactttgttggatggaagtcctgcgcctaggctgaaaatctgtgattttgggtattcaaagtcgtctttgttgcactcgcaacccaagtcgaccgtgggaacacctgcctacattgctccagaggtcctgtcgaagaaagagtacgatggcaagattgccgatgtgtggtcgtgtggagtgaccttgtacgtgatgttagtgggggcatatccgtttgaggatcccgatgacccaaggaatttcaggaaaaccattgggcgtatcttgagcgtgcagtactccatccccgactatgtgcacatttccgtggagtgcaggcatttgctgtctaggatatttgttgctaacccagccaagagaatcaacatccaagaaattaagaaccacgagtggtttttgaaaaatttacctgcagacttagtagacctggctgataggagttacgactttgaggacccgaatcatcccccacagagcatcgaagagatcatgcgcatcattggcgaagctagagagccaggagcaggtgcaccaggaaattattttggtgatccgttagatgacatggatgtggagaacgatgtggaccccgatatcgatagcagtggggagttcgtatgtgcaatgtagggtagcagttagagcgacggttaacc

SEQ ID NO: 82 - protein, 348 aa, Physcomitrella patens
MDHLDIPGMHDHDRYELVKDIGSGNFGVARLMRDKKTRELVAVKYIERGEKIDENVQREIINHRSLRHPNIVRFKEVLLTPTHLAIVMEYAAGGELFERICNAGRFSEDEARFFFQQLISGVSYCHSMQICHRDLKLENTLLDGSPAPRLKICDFGYSKSSLLHSQPKSTVGTPAYIAPEVLSKKEYDGKIADVWSCGVTLYVMLVGAYPFEDPDDPRNFRKTIGRILSVQYSIPDYVHISVECRHLLSRIFVANPAKRINIQEIKNHEWFLKNLPADLVDLADRSYDFEDPNHPPQSIEEIMRIIGEAREPGAGAPGNYFGDPLDDMDVENDVDPDIDSSGEFVCAM

SEQ ID NO: 83 - DNA, 1095 bp, Brassica napus
atggataagtatgaggttgtgaaggatctggggactgggaacttcggtgtggctcgccttcttaggcacaaggaaaccaaagagcttgtcgccatgaagtacatcgagagaggccgaaagatagatgagaacgtggctagagagattatcaatcacagatcacttaagcatcctaatatcatccgcttcaaggaggtgattctgacacctactcatcttgccattgtgatggagtatgcttctggtggagagctctttgagagaatctgtactgccggtagattcagtgaagctgaggctaggtacttctttcagcagctgatttgtggggttgactactgccactccttgcaaatatgccacagagatctgaagcttgagaacacattgcttgatggtagccctgctccgcttttgaaaatctgtgattttggttactccaagtcatctatactacattctaggcctaaatcgactgttggaactccagcatacatagcacctgaagttctttcccgtagagaatatgatggcaagcacgcggatgtgtggtcatgtggtgtaaccctttatgtgatgctggttggagcttacccatttgaggaccctaatgatccaaagaacttcaggaaaacaatccaacgtataatggctatacaatacaagattccggactacgttcacatatctcaggaatgcaaacaccttctctctcgcatattcgtcactaaccccgctaagagaatcacgcttaaggagatcaagaatcatccgtggtacttaaagaatctgccaaaggagctgctggagtctgctcaagcggtgtattacaagagagacaacacgagctattctcttcaaagcgtagaggacataatgaagatagttggagaagctaggaatccagcttcttcttcaagcgtcagcaaaagcttgggatcaggggttgaggaagaagaggatgttgaagctgaagtggaagtggaagaagaagaggaggaagaagaagaagaagaagatgaatacgagaagcatgtcaaagaggcacattcttctattcaagagcctcacgaagcgttaaaggaaaaaaaatga

SEQ ID NO: 84 - protein, 317 aa, Brassica napus
MDKYEVVKDLGTGNFGVARLLRHKETKELVAMKYIERGRKIDENVAREIINHRSLKHPNIIRFKEVILTPTHLAIVMEYASGGELFERICTAGRFSEAEARYFFQQLICGVDYCHSLQICHRDLKLENTLLDGSPAPLLKICDFGYSKSSILHSRPKSTVGTPAYIAPEVLSRREYDGKHADVWSCGVTLYVMLVGAYPFEDPNDPKNFRKTIQRIMAIQYKIPDYVHISQECKHLLSRIFVTNPAKRITLKEIKNHPWYLKNLPKELLESAQAVYYKRDNTSYSLQSVEDIMKIVGEARNPASSSSVSKSLGSGAE

SEQ ID NO: 85 - DNA, 1065 bp, Brassica napus
atggacaagtacgagctggtgaaggacataggcgcggggaatttcggagtggcgaggctcatgaaggttaaaaactccaaggagcttgttgccatgaagtacatcgagcgtggtcccaagatcgatgagaacgtggcgagagagatcataaatcacagatcacttcgccatcctaacatcatccgctttaaagaggttgtgttgactccgactcatcttgctattgccatggagtatgctgctggtggtgaacttttcgagcgtatttgcagtgctggaagattcagtgaagatgaggcgagatacttcttccagcagcttatatcaggtgttagctattgccatgctatgcaaatatgccatagagatctgaagctcgagaatacactccttgatggaagtcctgctccacgtctcaaaatctgtgattttggttattccaagtcctctctgctgcactccaggcccaaatcaacagttggaactccagcatatattgcacctgaagtcctttctcgcagagaatacgatggcaagatggctgatgtatggtcctgtggtgtaactctttatgtcatgctggttggagcctacccattcgaagaccaggaagatcccaaaaacttcaggaaaacaatacaaaaaatcatggctgttcagtacaagatcccggactacgtccacatctcacaggattgcaaacatctcctttcccgtatatttgtggccaactcactccagaggataaccattgcagaaatcaagaaacacccatggttcatgaagaacttgccaagggaactcacagagacagctcaagctgcgtatttcagaaaagagaatccgaccttctcactccaaaccacagaagagatcatgaagatagtggatgacgccaaaacgcccccgcctgtttccaggtccattggaggttttggctggggagatgaagaagggaaagaggaagaagaggtggatgaagaggaggtggtggaggacgaggaagatgagtatgataagactgtaaagcaagtacacgctagtggagaagtgaaaatcacttga

SEQ ID NO: 86 - protein, 354 aa, Brassica napus
MDKYELVKDIGAGNFGVARLMKVKNSKELVAMKYIERGPKIDENVAREIINHRSLRHPNIIRFKEVVLTPTHLAIAMEYAAGGELFERICSAGRFSEDEARYFFQQLISGVSYCHAMQICHRDLKLENTLLDGSPAPRLKICDFGYSKSSLLHSRPKSTVGTPAYIAPEVLSRREYDGKMADVWSCGVTLYVMLVGAYPFEDQEDPKNFRKTIQKIMAVQYKIPDYVHISQDCKHLLSRIFVANSLQRITIAEIKKHPWFMKNLPRELTETAQAAYFRKENPTFSLQTTEEIMKIVDDAKTPPPVSRSIGGFGWGDEEGKEEEEVDEEEVVEDEEDEYDKTVKQVHASGEVKIT

SEQ ID NO: 87 - DNA, 1080 bp, Glycine max
atgactgttgggccaggaatggatatgccgatcatgcatgacagtgacaagtatgagctggtccgtgatattgggtctgggaattttggggtggcaaggctcatgagagacaagcacactgaggagcttgttgctgtcaagtatattgagagaggtgacaagatagatgaaaatgtacgaagggaaattataaatcaccgatcactgaggcatcccaatattgtcaggttcaaggagatcatattaacccctacacatttggctattgtgatggagtacgcttctgggggagagttatttgagcggatatgcaatgcaggacggtttagtgaagatgaggcacgcttcttcttccaacaacttatatcaggggttagctactgtcatgcaatgcaagtatgccatcgtgacttgaagttggagaacacattgttggatggtagtccagctcctcgtttgaagatttgtgattttgggtattcaaagtcctccgtgctacattcacaacctaaatctacagtcggtacccctgcatacattgctcctgaagttttgcttaagaaggaatatgacggcaagattgcagatgtgtggtcttgtggggtgaccttatatgtcatgttggtgggtgcatatccttttgaggatccagaggaacctaaaaatttccggaagacaattcataggattttgaaagtccagtactcaattcctgattatgttcatatatcttctgagtgccgtcatctaatctctaggatctttgtggcagaccctgcacagagaataagtattcccgagattcgaaaccacgaatggtttttgaagaacctgccggccgatctcatggttgagaacacgatgaacaggcaatttgaggagcctgatcaaccaatgcagagcattgaagaaatcatgcagataatcagtgaggctacaattcctgcagccggaactcagtctctcaaccagtatcttactggtagcttggacattgatgacgacgacatggacgaggacctagagaccgatcccgacctcgacattgatagcagtggagaaatagtttatgcaatatga

SEQ ID NO: 88 - protein, 359 aa, Glycine max
MTVGPGMDMPIMHDSDKYELVRDIGSGNFGVARLMRDKHTEELVAVKYIERGDKIDENVRREIINHRSLRHPNIVRFKEIILTPTHLAIVMEYASGGELFERICNAGRFSEDEARFFFQQLISGVSYCHAMQVCHRDLKLENTLLDGSPAPRLKICDFGYSKSSVLHSQPKSTVGTPAYIAPEVLLKKEYDGKIADVWSCGVTLYVMLVGAYPFEDPEEPKNFRKTIHRILKVQYSIPDYVHISSECRHLISRIFVADPAQRISIPEIRNHEWFLKNLPADLMVENTMNRQFEEPDQPMQSIEEIMQIISEATIPAAGTQSLNQYLTGSLDIDDDDMDEDLETDPDLDIDSSGEIVYAI

SEQ ID NO: 89 - DNA, 1083 bp, Glycine max
atggatcgggcggcgttgacggtcggaccgggcatggacatgccgataatgcacgacagcgaccgttacgatctggtccgcgacatcgggtccggaaatttcggcgtggcgaggctgatgcaggataaacaaaccaaggaactcgtcgccgtcaagtacatcgaaaggggtgataagattgatgaaaatgtgaagagggaaattatcaatcacaggtctctgaggcatcctaacattgttaggtttaaagaggtaattttaacacctactcatcttgctattgtaatggaatatgcatctgggggagagctctttgagaaaatctgcaatgctgggcgttttaccgaggatgaggctcgattcttctttcagcaactcatatctggggtcagctattgccatgctatgcaagtatgtcatcgggacttgaagcttgaaaacactttgctggatggaagcccggcacctcgtttaaagatatgcgattttgggtactccaagtcttcagtgcttcattcacaaccaaagtcaactgtgggaactcctgcatatattgctccagaagtattgctgaaacaagagtatgatggcaagcttgcagatgtctggtcatgtggagtaaccttatatgtgatgctagtgggagcatatccttttgaggatcctaatgaaccaaaggactttcggaagacaattcagagagttcttagtgtccagtattccattccggacggagttcaaatatctccagagtgtcttcaccttatttcaaggatctttgtttttgacccggcagagagaatcaccatgtctgaaatctggaaccatgaatggtttctgaagaatctcccggcagacctgatggacgagaagataatgggcaatcaatttgaagagccagaccaacccatgcagagcatcgatacgatcatgcagataatttcagaagctaccgtaccagcagttgggacctattcttttgaccagtttatggaggaacaaatttatgacttggaatctgaatctgatgctgaatctgatcttgatatagatagcagtggggagatagtgtatgccatatag

SEQ ID NO: 90 - protein, 360 aa, Glycine max
MDRAALTVGPGMDMPIMHDSDRYDLVRDIGSGNFGVARLMQDKQTKELVAVKYIERGDKIDENVKREIINHRSLRHPNIVRFKEVILTPTHLAIVMEYASGGELFEKICNAGRFTEDEARFFFQQLISGVSYCHAMQVCHRDLKLENTLLDGSPAPRLKICDFGYSKSSVLHSQPKSTVGTPAYIAPEVLLKQEYDGKLADVWSCGVTLYVMLVGAYPFEDPNEPKDFRKTIQRVLSVQYSIPDGVQISPECLHLISRIFVFDPAERITMSEIWNHEWFLKNLPADLMDEKIMGNQFEEPDQPMQSIDTIMQIISEATVPAVGTYSFDQFMEEQIYDLESESDAESDLDIDSSGEIVYAI

SEQ ID NO: 91 - DNA, 1011 bp, Glycine max
atggaagaacggtatgagccattgaaggagcttggtgctgggaattttggtgtggcaaggttggcaaaagacaagaaaactggagagcttgttgcggtcaaatacatagagaggggcaaaaagattgatgagaatgttcagagggagataattaaccaccgatctttaaggcatccaaatataatcaggtttaaagaggtgttactgacccctacacatttagctatcgtcttggagtatgcttcaggtggtgaactttttgagaggatatgtactgctggtcgatttagcgaagatgaggcaagatatttcttccagcagctaatatctggggttagctactgtcattcaatggaaatttgtcatagagatctaaaattggaaaacactctcttggacggaaatccatctccccggcttaaaatttgtgactttggttattccaagtctgctctactgcactctcaacctaaatcaacagttggaactcctgcatacattgctccggaggttctgtcgcgaaaggagtatgatggaaagatttcagatgtttggtcctgtggagtgactctttatgtcatgttagttggtgcatacccatttgaagatccagaagatcctagaaatttcagaaagactattgggagaataatcggtattcagtactccatacccgactatgttcgtgtttcttctgactgtaggaatcttctctctcgcatctttgttgctgatcctgccaagaggatcaccatcccagagataaaacagtatccttggtttctgaagaatatgcctaaagagatcatcgaagctgaaagaaaaggattcgaggaaacaaccaaagaccaaccaaaccagaaggtggaggaaatcatgaggataattcaagcggcaaggataccaggacaaggatccaaagctggagaaggtggacaagctggcactggatcattagatattgaggatgatgaggaaattgatgttagtggtgactatgaacaagtgtga

SEQ ID NO: 92 - protein, 336 aa, Glycine max
MEERYEPLKELGAGNFGVARLAKDKKTGELVAVKYIERGKKIDENVQREIINHRSLRHPNIIRFKEVLLTPTHLAIVLEYASGGELFERICTAGRFSEDEARYFFQQLISGVSYCHSMEICHRDLKLENTLLDGNPSPRLKICDFGYSKSALLHSQPKSTVGTPAYIAPEVLSRKEYDGKISDVWSCGVTLYVMLVGAYPFEDPEDPRNFRKTIGRIIGIQYSIPDYVRVSSDCRNLLSRIFVADPAKRITIPEIKQYPWFLKNMPKEIIEAERKGFEETTKDQPNQKVEEIMRIIQAARIPGQGSKAGEGGQAGTGSLDIEDDEEIDVSGDYEQV

SEQ ID NO: 93 - DNA, 1089 bp, Linum usitatissimum
atggatcggtcgtcggtgatggttggtgcagggatggatatgccgatcatgcacgacagcgaccgctacgacttcgtcagggatattgggtctgggaacttcggggttgctaggttgatgcgggacaaggtcaccaaggagctcgtcgctgtcaaatacatcgagcgtggagataagattgatgagaacgttcaaagggaaatcattaatcataggtctctgaggcatcccaacattgtgaggtttaaagaggtcatcctgacacctactcatctggcaatcgttatggaatatgcatccggtggagagctctttgagcgaatatccagtgctggccgtttcggtgaggatgaggctcgctttttcttccaacaactgatttccggggttagctattgccatgctatgcaagtgtgtcaccgtgatttgaagttggagaatacattgttagatggaagccctgctcctcggttaaaaatttgtgattttgggtactcaaagtcatcggtgcttcattcacaaccaaagtctactgtgggaactcctgcttatattgctcctgaagttctgttaaggcaagaatatgatggaaaggttgcggatgtgtggtcttgcggagtcaccttatatgtgatgctgatcggtggatatcccttcgaggatcctgaagagcccaaagatttcaggaagaccatacaaagaattcttagtgttcaatataccattccggacactattcacctctctcaagagtgccgcgacctcatagccaggattttcgtcttcgatccagctactcggattacaattcctgacatcaagaaccatgtatggtttctgaggaacctcccggcagacctgatggacgaaaggacgatgggtaaccagtttgttgaggccgaccaacccctccagagcgtggacacgatcatgcagataatctcggaggccaccataccgccagctggctcgcagcgtcttaaccaatacatggcggacaacctggacatcgacgatgacatggaggacttggactcggaatctgagctcgatattgacagcagcggggagattgtctatgcattatga

SEQ ID NO: 94 - protein, 362 aa, Linum usitatissimum
MDRSSVMVGAGMDMPIMHDSDRYDFVRDIGSGNFGVARLMRDKVTKELVAVKYIERGDKIDENVQREIINHRSLRHPNIVRFKEVILTPTHLAIVMEYASGGELFERISSAGRFGEDEARFFFQQLISGVSYCHAMQVCHRDLKLENTLLDGSPAPRLKICDFGYSKSSVLHSQPKSTVGTPAYIAPEVLLRQEYDGKVADVWSCGVTLYVMLIGGYPFEDPEEPKDFRKTIQRILSVQYTIPDTIHLSQECRDLIARIFVFDPATRITIPDIKNHVWFLRNLPADLMDERTMGNQFVEADQPLQSVDTIMQIISEATIPPAGSQRLNQYMADNLDIDDDMEDLDSESELDIDSSGEIVYAL

SEQ ID NO: 95 - DNA, 1113 bp, Linum usitatissimum
atggataagtacgagctggtgaaagacataggatccggcaattttggggttgccaggctgatgaggaacaagcagaccagagagctcgtcgccatgaagtatattgagcgtgggcctaagattgatgagaatgtggcaagagagatcataaatcacagatcgttgcgccatcctaacataattcgcttcaaggagctggttctgactccaactcatcttgcgatagtgatggagtatgctgctggaggagagctctttgagcgcatttgcaatgctggaaggttcagcgaagatgaggctaggtacttcttccaacaacttatttcaggcgtcagctactgtcattccatgcaaatatgccatagagatttgaagctggaaaatactttactggatggaagcccagctccacgcttgaagatatgtgattttggttattcaaagtcttctttgcttcattcaagaccaaaatctactgtcgggactcctgcatatattgctcccgaggttctttctcgcagagaatatgatggcaagctggcagatgtctggtcatgtggagtaacactctatgttatgctggtgggagcatatccctttgaagaccaagatgacccaaagaatttcagaaaaacaattaacagaataatggctgttcagtacaagattccagactatgtacacatatcgccagattgcaggcacctcatttcccacatatttcttgcacatccactcaagaggatcacaatcaaagaaatcaagagccacccatggtttttgaagaatttgccgagggagctaacagaggcggcacaaaccatgtactacaggaaagaaaacccagccttctccttacaaacagtggaagaaataatgaaaatcgtggacgatgccaaagttccggcaccagtgtcgagatccatcggaacgtttggctggggaggagacgaagacgaagagacgaaggaagaggaggcagagccggaggctgaaaccgaggcggaggctgaggctgtggaaggaggacgcgctgtggaaggaggaggcgtagatgagtatgaaaagagagttaaggaggcacaagccagcggggaattccgtgttagctaa

SEQ ID NO: 96 - protein, 370 aa, Linum usitatissimum
MDKYELVKDIGSGNFGVARLMRNKQTRELVAMKYIERGPKIDENVAREIINHRSLRHPNIIRFKELVLTPTHLAIVMEYAAGGELFERICNAGRFSEDEARYFFQQLISGVSYCHSMQICHRDLKLENTLLDGSPAPRLKICDFGYSKSSLLHSRPKSTVGTPAYIAPEVLSRREYDGKLADVWSCGVTLYVMLVGAYPFEDQDDPKNFRKTINRIMAVQYKIPDYVHISPDCRHLISHIFLAHPLKRITIKEIKSHPWFLKNLPRELTEAAQTMYYRKENPAFSLQTVEEIMKIVDDAKVPAPVSRSIGTFGWGGDEDEETKEEEAEPEAETEAEAEAVEGGRAVEGGGVDEYEKRVKEAQASGEFRVS

SEQ ID NO: 97 - DNA, 1053 bp, Zea mays
atggacatgccgatcatgcacgacagcgaccggtacgagctcgtgcgcgacatcggctccggcaacttcggcgttgcccgcctcatgcgcgaccgccgcaccaccgaactcgtcgccgtcaagtacatcgagcgtggcgagaagatagatgagaatgtccagcgcgaaataattaaccatagatcattgaaacaccctaacattattaggtttaaagaggttattttaacaccgacccatcttgctattgtcatggaatatgcctctggcggtgagctttttgagagaatatgtaagaacgtgcgattcagtgaagatgaggctcgctacttcttccaacaactcatttcaggagtaagctactgccattcaatgcaagtatgccaccgtgatttgaagctggagaacacacttctagatgggagtgatgctcctcgcttgaagatatgtgacttcggttattccaagtcatctgttcttcattcccaaccgaagtcaactgttggaacacctgcttatattgcacctgaagttttgttgaaaaaagaatatgatggcaagattgctgacgtttggtcatgtggtgtaaccctctatgtaatggttgttggcgcatatccttttgaagatccagaagagcctaagaacttccgcaagacaattcagcgtatcttgaatgttcagtacgcaattccagacaacgtgaacatatctccagagtgcaggcatctaatttcgaggatttttgttggcgatcctgctacgcgaataacaatccctgaaatccggaatcatagttggttcctgaagaaccttcctgctgatctgatggatgatgatagcatgagcaaccaatatgaggagcctgaccagccaatgcagaccatggatcagatcatgcagattttaacagaggccaccataccacctgcctgttctcgcagtataaatgtcctagctgatggactggacatggatgacgacatggatgatcttgattccgactcagatcttgatgttgacagcagcggtgagattgtgtacgcaatgtga

SEQ ID NO: 98 - protein, 350 aa, Zea mays
MDMPIMHDSDRYELVRDIGSGNFGVARLMRDRRTTELVAVKYIERGEKIDENVQREIINHRSLKHPNIIRFKEVILTPTHLAIVMEYASGGELFERICKNVRFSEDEARYFFQQLISGVSYCHSMQVCHRDLKLENTLLDGSDAPRLKICDFGYSKSSVLHSQPKSTVGTPAYIAPEVLLKKEYDGKIADVWSCGVTLYVMVVGAYPFEDPEEPKNFRKTIQRILNVQYAIPDNVNISPECRHLISRIFVGDPATRITIPEIRNHSWFLKNLPADLMDDDSMSNQYEEPDQPMQTMDQIMQILTEATIPPACSRSINVLADGLDMDDDMDDLDSDSDLDVDSSGEIVYAM

SEQ ID NO: 99 - DNA, 1086 bp, Zea mays
atggacaagtacgaggcggtgcgggacatcgggtcggggaacttcggggtggcgcggctgatgcgcaaccgcgagactcgagagctcgtcgccgtcaagtgcatcgagcgtggccaccggattgacgagaatgtgtacagggagatcatcaaccaccgctcgctgcgccatcccaacattattcgcttcaaggaggtgatacttacaccaacacatcttatgattgtgatggagtttgcagcaggtggagagctttttgatcggatctgtgatcgtgggcggtttagtgaggatgaggcccggtatttctttcagcagttgatctgtggagtgagctattgccattacatgcaaatatgccatagagatctgaagctggagaatgttctcttggatggcagcccagctccacggcttaagatctgcgattttggctattccaagtcatcagtgttgcattcaagacccaaatcagcagtaggaacgccagcatatattgcacctgaggtgctatcccgtcgcgagtatgatggaaagcttgcagacgtatggtcctgtggggtgactctttacgtcatgcttgtgggagcatacccatttgaagacccagatgaccccaagaatatacgcaagaccattcagcaaataatgcaagtgcaatacaagataccagatcatgtccacatatctacggaatgccagcaacttattgcccgtatctttgttgccaatccaatgaggagaatcacaatgaaggaaataaagagccatccatggtttttgaagaacctaccacgggaactcacggagactgcacaaggcatgtactacaggagggataacagggtcccttcttattcagaccaaacgtcggaagaaatcatgaagatagttcaagatgcaaggaccatgccgaaatcatccagatcaggctatgggtggagcagtgagtattcggatgaagaagaagagaaggaagaggaacacagaccagaggagcatgaggaagaggaagatgaatacgataggagggtgaaggaggtccatgcaagcggagaactccgtatggacgctcttcacatatga

SEQ ID NO: 100 - protein, 361 aa, Zea mays
MDKYEAVRDIGSGNFGVARLMRNRETRELVAVKCIERGHRIDENVYREIINHRSLRHPNIIRFKEVILTPTHLMIVMEFAAGGELFDRICDRGRFSEDEARYFFQQLICGVSYCHYMQICHRDLKLENVLLDGSPAPRLKICDFGYSKSSVLHSRPKSAVGTPAYIAPEVLSRREYDGKLADVWSCGVTLYVMLVGAYPFEDPDDPKNIRKTIQQIMQVQYKIPDHVHISTECQQLIARIFVANPMRRITMKEIKSHPWFLKNLPRELTETAQGMYYRRDNRVPSYSDQTSEEIMKIVQDARTMPKSSRSGYGWSSEYSDEEEEKEEEHRPEEHEEEEDEYDRRVKEVHASGELRMDALHI

SEQ ID NO: 101 - DNA, 745 bp, Brassica napus
aaaaaaactcagaaagcgatagagagaggccaaaaaatggcggatgaatctccaaagtctatctacgacttcaccgtcaaggatatctcaggtaacgatgtgagtttgagccaattcaaaggcaaaactcttctgattgtaaacgttgcctccaaatgtggactaacggatgcgaactacaaggaactcaatgttctgtacgaaaaatacaaggaacaagggttggagatattagcgttcccatgcaatcagtttttgggacaagaaccaggaaacaatgaagagattcagcaaactgtctgcacaaggttcaaagctgagttccccatctttgacaaggtagatgtgaacgggaagaacacggccccgttatacaaatacttgaaagcagagaaaggaggattgctaattgacgcaatcaaatggaacttcacaaagttcttggtttctcctgacggcaaagtctcccagagatattctcccagaacgtctcctcttcagttcgagaaagacattcaagctctgctgggacaggcttcttcttgaatcatcatcgaaagcttcaagaacgggtttatctatttattaaacgtttttacatttggtccgtgtcttaagaatccacaactttgcaaacttgtttgttcgcttaatccttgagaccgcgtctttaaataaagtgtcgtttcattgataagaaataaaaagaaatcagggccggcttgacacgaaaaaaaaaaaaaaa

SEQ ID NO: 102 - protein, 169 aa, Brassica napus
MADESPKSIYDFTVKDISGNDVSLSQFKGKTLLIVNVASKCGLTDANYKELNVLYEKYKEQGLEILAFPCNQFLGQEPGNNEEIQQTVCTRFKAEFPIFDKVDVNGKNTAPLYKYLKAEKGGLLIDAIKWNFTKFLVSPDGKVSQRYSPRTSPLQFEKDIQALLGQASS

SEQ ID NO: 103 - DNA, 1121 bp, Zea mays
cgccacctccgtccacgacttcatcgtcaaggtcagtcccattcccctcgtcgccctctcaacccctaaacgcctccgtgcgtagattccagaggtggtacgatcataggccctctgaaccccaaaacgtctctgtgcgtagattccagaggtgataggatcataggacccccgtaaatccgtaatattttgcatggatcgcttgctttgcgtgcggcgtgccccggagctgcaagctcgaggccactgtgctgtgcttagtccgggattggggctttatggttcctgattcgtgcggagctcttagtgtgaatttcgctgtcgaaccgtgtgatttggcttgcaaaatgactggatttgctaacccttacctagcggtttttgccgaatttttagaagagtagatgccgcggcttatgtttttgcagaggagtctaattatcgccacctccgtccacgacttcatcgtcaaggatgcgagcggcaaagacgttgacctcagcacctacaaggggaaggttcttctcattgttaacgtcgcatcccagtgtggcttaaccaactccaactacactgagctggcccagctctatgagaagtacaaggaccaaggctttgaaatcctggctttcccatgcaaccagtttggtgggcaggagcctggtaccaatgaggagattgtccagtttgcctgcacacgcttcaaggctgagtaccccatcttcgacaaggttgatgtcaacggtagcaatgctgcgcccatctacaagttcttgaaatctagcaaaggtggccttttcggcgacagcatcaagtggaacttttccaagttcttggttgacaaggagggacgtgttgtggatcgctatgctccaaccacttcacccctgagcattgagaaggatatcaagaagctgcttgggagctcttaatcagtatctgggtgcaaagctgtagaaaaacatgtatcaacaatgccctgagcgataaaatatatgataagttgtattaataaagtattgtcgtacttgagaggttgcagtatctgctctatttcccttgcaaaaaaaaagtacttgtatatccccttgtcaccaaatcagccctcgaatgaattccaa

SEQ ID NO: 104 - protein, 175 aa, Zea mays
MPRLMFLQRSLIIATSVHDFIVKDASGKDVDLSTYKGKVLLIVNVASQCGLTNSNYTELAQLYEKYKDQGFEILAFPCNQFGGQEPGTNEEIVQFACTRFKAEYPIFDKVDVNGSNAAPIYKFLKSSKGGLFGDSIKWNFSKFLVDKEGRVVDRYAPTTSPLSIEKDIKKLLGSS

SEQ ID NO: 105 - DNA, 861 bp, Brassica napus
ccaaaaaatggctttttcgtcttcttattactcaccattctctgcactcttcgacgtttccaaacccaatccatctctaaaccccgcggcttttctcgtcccttccttgaaattctccaccgccatatcgaatttcgcgaatctgagtaatgggttctctctaaaatctccgattaatcctgggtttctcttcaagtcccgagctttcaatgttcaagctcgagctgctgctgagaagaccgttcacgatttcaccgtaaaggacattgatgggaatgatgtttctttgaacaagtataaggggaaagttatgttgatcgtcaatgtcgcttcaagatgtggtttgacatcatcaaattactcagagctttcacatctgtatgagaaatacaagagccaaggatttgagattctagctttcccttgtaatcagtttggtggccaagagcccggttcaaaccctgagatcaaacagtttgcttgcacccggtttaaagcagagttccctatatttgataaggtcgatgtgaatggaccgagcacagcaccaatctatcagttcttgaaatcaaacgcaggaggattcttgggtgatctcattaaatggaactttgagaagttcttgattgataaaaagggaaaggtcgttgagaggtaccctcccaccacatcccctttccaaatcgagaaggacatcaagaagttgcttgctgcttaataacctctgcgatgagagaccacacagactgattgtaaaatattcagtacttgaaactcggttttgctggttatggtttgtatacattgtaacgatatatattttattacaatgctaagtatgattacaaaaaaaaaaaaaaa

SEQ ID NO: 106 - protein, 236 aa, Brassica napus
MAFSSSYYSPFSALFDVSKPNPSLNPAAFLVPSLKFSTAISNFANLSNGFSLKSPINPGFLFKSRAFNVQARAAAEKTVHDFTVKDIDGNDVSLNKYKGKVMLIVNVASRCGLTSSNYSELSHLYEKYKSQGFEILAFPCNQFGGQEPGSNPEIKQFACTRFKAEFPIFDKVDVNGPSTAPIYQFLKSNAGGFLGDLIKWNFEKFLIDKKGKVVERYPPTTSPFQIEKDIKKLLAA

SEQ ID NO: 107 - DNA, 848 bp, Brassica napus
gagatcctcgtttcggcttctctatataacaagaaccaatcttctggttcgagcttcaccatcatcgctctctcgactcccatctaagttcacttctgcgaaaccacttgtcagttctcatcatcagattccgttatcaacaacgggagctaaactttctaggtcggaacattccatggctgcttcctccgaacccaaatccatctatgatttcaccgtcaaggatgcgaagggaaacgatgttgatctaagcacttacaaggggaaggttctgttgattgtcaacgttgcttctcagtgtggcttgaccaattcgaactatactgagcttgcacagctgtaccagaagtacaaagaccatgggtttgagatccttgcattcccctgtaaccagtttggtaatcaagaacctggttctaatgaagagattgttcagtttgcttgtacccgtttcaaggccgagtaccccatcttcgacaaggttgatgtgaacggtgactcggctgctccaatctataagttcctgaaatcaagcaaaggagggctttttggagacggaatcaagtggaacttcgccaagttcttggttgacaaagatgggaatgttgtggaccgttacgctccaactacttcccctctcagcattgagaaggacctgaagaaactgttgggagttactgcttaagcaactaataggcgcaagtattcaaataaaagctcctatagtattgtaataagctgtgtctatgttcttgagtgtctttgggatgagtcgtctcctactacttaaactcctcctttttagttactgatgtgtgtaacatcgttgacctaaaaaaaaaaaaaaa

SEQ ID NO: 108 - protein, 169 aa, Brassica napus
MAASSEPKSIYDFTVKDAKGNDVDLSTYKGKVLLIVNVASQCGLTNSNYTELAQLYQKYKDHGFEILAFPCNQFGNQEPGSNEEIVQFACTRFKAEYPIFDKVDVNGDSAAPIYKFLKSSKGGLFGDGIKWNFAKFLVDKDGNVVDRYAPTTSPLSIEKDLKKLLGVTA

SEQ ID NO: 109 - DNA, 879 bp, Brassica napus
aagacttcaaaatgatataatttaaatggaatattatttaaaaaaaatcaggtggtggtggataatacagcaacaaaaaacagacgtagaacttggttggagagttccggctgcgagaagatgggtggttcaatatcagtgcctgaaaaatctatccatgaattcactgtcaaggatagctccggcaaggaggttgaccttagcgtttaccaagggaaggttcttctcatcgtcaacgtcgcttctaaatgcggtttcactcaaaccaattacacccagcttactgaactttaccggaaatacaaagatcaagggttggtgatattggcgtttccttgcaaccagtttttgaaccaagagcctggcactagccaagatgctcacgaatttgcttgtactaggttcaaggccgagtaccccgtcttccaaaaggtgcgtgtgaatggtcaaaacgcagcaccagtctacaaattcctcaagtcaaagaagccatctttccttggaagcaggatcaaatggaacttcaccaagttcttggtcggcaaagatggtcaagtcattgatcgttatggccccactgttccacctctttccatcgagaaagacatcaagaaagccctcggagatgaaggagcgtttccaagtacttagcccttgaagaagaagaagacacagagagaggctcttgaagaagttctctcttactctttgatatcactcattttgtagtttatatggtgaagaagatgtacacgtttccatagcacaaccctgtgtagcttccatatgcctctttgggcctagcatttgatcttccgaactaattattcaacgattatctcgataatttataaaaaaaaaaaaaaaaaaaaaaaaaaa

SEQ ID NO: 110 - protein, 176 aa, Brassica napus
MGGSISVPEKSIHEFTVKDSSGKEVDLSVYQGKVLLIVNVASKCGFTQTNYTQLTELYRKYKDQGLVILAFPCNQFLNQEPGTSQDAHEFACTRFKAEYPVFQKVRVNGQNAAPVYKFLKSKKPSFLGSRIKWNFTKFLVGKDGQVIDRYGPTVPPLSIEKDIKKALGDEGAFPST

SEQ ID NO: 111 - DNA, 752 bp, Glycine max
tctctctctctctctctctctctctctctctctctctctctctctctctctctgactatatcacactatggccacctcaaacgccaaatcattccatgatttcaccgttatagatgccaagggaaatgatattaaccttggtgactacaaaggaaaggtccttatcattgtcaatgttgcctcacaatgtggcttgactaattcaaattacactgagctcagtcagttgtatgagaaatacaaacagaaaggtctggaaattctggcgttcccatgcaatcagtttggggcacaggagcctggatctaatgaacagatacaagagtttgtttgtactcgcttcaaggctgagtttcccgtttttgacaaggttgatgtgaatggtgacaaggctgctccactgtacaaatatctaaaatcaagcaaaggtggactccttggggatggcatcaaatggaacttcgccaagttccttgttgataaagaggggaatgttgttgatcgctatgcacccacaacttctcctctgagcattgagaaggacttgctgaagttgttggatgcatgaagttatgaatgtttggagttgccaataaataaactatgaataagaaatgtactgcagatgctgctgcaatttcctgtgtgccttatatgtaccgaaacagttgctcttgtagctttgacattagattcataaccatgatattgtgtacttattatagtgtgaatgtgaagttaagctaccttta

SEQ ID NO: 112 - protein, 166 aa, Glycine max
MATSNAKSFHDFTVIDAKGNDINLGDYKGKVLIIVNVASQCGLTNSNYTELSQLYEKYKQKGLEILAFPCNQFGAQEPGSNEQIQEFVCTRFKAEFPVFDKVDVNGDKAAPLYKYLKSSKGGLLGDGIKWNFAKFLVDKEGNVVDRYAPTTSPLSIEKDLLKLLDA

SEQ ID NO: 113 - DNA, 1046 bp, Glycine max
tttgggctcttgggtatcaagccttgtgttggctgtaatagaataagcttcaattggaaacgccagagctccatcaccggaacaagacccaggcaggtgtcgcagtacgcggagaaaggacgctatataaatatatttgtccccgatgctctctatttcagccactcgtatattcttcctccgctcaacaactataagattatcttcttcttcttcttctcttcaattcttctccaatcccaaccgcaccctcttccgtccctttcttcacacttcgctcaacaactataataacatctttctctctccgaacagatcacactatggccacctcaagcgccaaatcagtccatgatttcaccgttaaagatgccaagggaaatgatattaatcttggtgactacaaaggaaaggtccttatcattgtcaatgttgcctcacaatgtggcttgactaattcaaattacactgagctcagtcagttgtatgagaaatacaaacagaaaggtctggaaattctggcatttccatgcaatcagtttggggcacaggagcctggatctaatgaacagatacaagagtttgtttgtactcgcttcaaggctgagtttcccgtttttgacaaggttgatgtgaatggtgacaaagctgctccactgtacaagtatctaaaatcaagcaaaggtggactctttggggatggtatcaaatggaacttctccaagttccttgttgataaagagggaaatgtggttgatcgctatgcacccacaacttctcctctgagcattgagaaggacttgctgaagttgttggatgcatgaatgaagctatgaatgactggagctgccaataaatgaattgtgattagaatataaattatgaataagaaatgtattgcagatgctgctgcaatttcctgtgtgccttgtatgtgtaccgaaacaggtactcttgtagctctgacattaggttcataaccataagattgtgtgcttaatattgtgtgaatgtaaacttaagcttcctttaaaaaaaaaaaaaaa

SEQ ID NO: 114 - protein, 166 aa, Glycine max
MATSSAKSVHDFTVKDAKGNDINLGDYKGKVLIIVNVASQCGLTNSNYTELSQLYEKYKQKGLEILAFPCNQFGAQEPGSNEQIQEFVCTRFKAEFPVFDKVDVNGDKAAPLYKYLKSSKGGLFGDGIKWNFSKFLVDKEGNVVDRYAPTTSPLSIEKDLLKLLDA

SEQ ID NO: 115 - DNA, 789 bp, Glycine max
tatctagctagcgttaccactttcaattccaaattcactctcagaaattagaatggctagccaatcaaacactaaatcagttcacgatttcacagttaaagatgccaggggaaatgatgttaatctcgccgattacaaaggaaaggtccttctccttgtcaatgttgcctcacaatgcggcttgactaattcaaactacacagagcttaatcaattgtatgagaaatacaaagggaaaggacttgaaattctggcattcccgtgcaatcagtttggggctcaggagccaggaactaatgaagagattgtggagtttgcttgtactcgcttcaaagctgagtttcccattttcgacaaggtggatgtgaatggtgacaatgctgctccactgtacaagtttctgaaatcaagcaaaggtggactctttggggatagtatcaaatggaacttctccaaattccttgttgataaggatggaaatgtcgttgaccgttatgcacccacaacttctcctcttagcattgagaaagacataaagaagctgctagatgcatgaatgactggagtggccactaaatgaaaaataatgattagaataacatcatgaataatgtactgcagatcagatattagtggaatttcctccgaatttgtactgaaacagttgctctgctcatgtacctctgaattactatttgcttcttcatctatatataaattgtgttgtgtatcaatttatatatgtaaacgaaattcattgctcgtttcattcttaaaaaaaaaaataaa

SEQ ID NO: 116 - protein, 167 aa, Glycine max
MASQSNTKSVHDFTVKDARGNDVNLADYKGKVLLLVNVASQCGLTNSNYTELNQLYEKYKGKGLEILAFPCNQFGAQEPGTNEEIVEFACTRFKAEFPIFDKVDVNGDNAAPLYKFLKSSKGGLFGDSIKWNFSKFLVDKDGNVVDRYAPTTSPLSIEKDIKKLLDA

SEQ ID NO: 117 - DNA, 924 bp, Glycine max
gaaaatagtttcagatacgttgcgttgattgattggtatgaagtgattgactttttttcttcttctattctcacacatacccatctactccttccctcatggctgaacaatcttccaactccatttacgatttcactgtcaaggacatcagtggaaatgatgtgagtctgaatgattacagcgggaaggttctactgattgtgaatgtcgcctctcaatgtggtttgacacagacaaattacaaagaattgaatgtattgtacgagaagtacaagaatcaaggatttgaaatcttggcatttccgtgcaaccagtttgctggacaggaaccaggaaacaatgaagaaattcaggaagtagtttgcacaaggttcaaggctgaatttcctatctttgataaggttgaagtcaatgggaagaatgcagtgccactttacaagtttttaaaggagaagaaagggggaatatttggcgatggtatcaagtggaacttcacaaagttcttagtaaacaaagaagggaaggttgtggacagatatgcacctaccacctcacctctgaaaatcgagaaagacatagagaagctcttgcaatcttgaatagtaagatttgattctacatatctaatgtgctgaggacatagggaatctgtccggtgccttcgaaggacaagtagcaatatgtatcataagttaatatatgccctgaaaagttcttaatgtatctcgtgtatttggattttggattgctcaataagtataaattggtgttctcactctgttaccaaaaccataaaataataatatatttggatgcatctttatgttaaaaaaaaaaaaaaaaaacatagaaaggacaaaaaatgaactagtgttaaacaatgaagagaataaggagaaaagatgggaatatcaaatatgcaaa

SEQ ID NO: 118 - protein, 166 aa, Glycine max
MAEQSSNSIYDFTVKDISGNDVSLNDYSGKVLLIVNVASQCGLTQTNYKELNVLYEKYKNQGFEILAFPCNQFAGQEPGNNEEIQEVVCTRFKAEFPIFDKVEVNGKNAVPLYKFLKEKKGGIFGDGIKWNFTKFLVNKEGKVVDRYAPTTSPLKIEKDIEKLLQS

SEQ ID NO: 119 - DNA, 957 bp, Glycine max
aattcggcacgagcccaaccactcaaaatgtcctccatggcttcctccaccgctttcttcacacccctccatgatttcactcaagccagaacaaccccatcaccccctttgcctttcatcaaatcctcctttgcttcctccaagtcaaccttttttcaccctgccctttccctacaaacctcttccaactttcccaggctttttggaaagcctaagtttttctctgttcatgcaagggctgccacagaaaaaaccatttatgattttactgtcaaggatattgacagaaaggatgtttctcttagcaagtttaaggggaaggttctattgattgtcaatgttgcttcacgatgtggtttgacatcatcaaattactcggagctgtcacgcttgtatgaaaaatataagaatcaaggtttggagattttagctttcccctgcaatcaatttggtatgcaggaacctggatcaaatgaagatattaagcaatttgcttgcactcgatataaagcagaatttccaatttttgataaggttgatgtcaatggaccatttacaactccagtgtaccagtttctgaaatcgagtgctggaggctttttgggtgatcttataaagtggaattttgagaaattcttggttgacaaaaatggtaaagttattgaaagatacccaccaacaacgtctccttttcaaattgagaaggatatccagaagttacttgctgcctgagtgtaattcagaacacaaacgagagctgtatgtaagagcacgaaccgagtgatgtgtgcacaataagttaaaactgaagatgagcaataagtatagctatgcaatttactttggtgtctttactaaagaaattatcagtttagggaagaaaattatactgtattaccccaaaatgattgaatatagtatatgtttctctctttttctttcaaaaaaaaaaaaaaa

SEQ ID NO: 120 - protein, 234 aa, Glycine max
MSSMASSTAFFTPLHDFTQARTTPSPPLPFIKSSFASSKSTFFHPALSLQTSSNFPRLFGKPKFFSVHARAATEKTIYDFTVKDIDRKDVSLSKFKGKVLLIVNVASRCGLTSSNYSELSRLYEKYKNQGLEILAFPCNQFGMQEPGSNEDIKQFACTRYKAEFPIFDKVDVNGPFTTPVYQFLKSSAGGFLGDLIKWNFEKFLVDKNGKVIERYPPTTSPFQIEKDIQKLLAA

SEQ ID NO: 121 - DNA, 997 bp, Glycine max
aagaaatcaaagagacagaaagttgagagagaagtgttcacgtctttgagaaatgggtgcttcggcatcggtcacagaaaaatccatccatgaattcatggtcaaggatgctaagggcagagacgtgaacctcagcacctacaaagggaaggttcttcttgtagttaacgtcgcttcaaaatgtggatttacaaattccaattacacccagttaactgagctttacagcaaatataaagacagaggtcttgagatactggcatttccatgcaaccagtttctgaaacaagagcccgggagtagccaggaggcagaggaatttgcctgtacaaggtacaaggctgagtatcccatttttggaaaggtacgtgtcaatggacctgatacagcacctgtctacaaattccttaaagcaaataaaacaggatttctgggtagtaggataaagtggaatttcactaagtttttggttgacaaggaagggcatgtcctcgctcgttatggtccaaccacctcaccgttgtccattgaaaatgacatcaagacagcattgggggaggcttgaaagactctacaatcacttcaaattggtgctcttgttgaagatgattgaaacataaggaatgtatatttgtagatgtttcttctagtgattatttcttacatatttcatgcctaggtttttttgtgtttgttgtattagaattctgttttgtttgtgattttagtcgttatttaaaaattaattaatgggcattagtttgagttgtgtgttagaagtgtgttttcatgtatcacttactaaatgcatgcaatcttcatggcctcatgtgtattaatgtctaggaagttgcatcacttgttataatgctagggaacagtccctaccaagtctatcaagagtctatatatatggatgatatgaagaacctatgtactgtattttacaagaacaaaaagcttttcattctgtaaattgtacgaaatcgtcgacccg

SEQ ID NO: 122 - protein, 170 aa, Glycine max
MGASASVTEKSIHEFMVKDAKGRDVNLSTYKGKVLLVVNVASKCGFTNSNYTQLTELYSKYKDRGLEILAFPCNQFLKQEPGSSQEAEEFACTRYKAEYPIFGKVRVNGPDTAPVYKFLKANKTGFLGSRIKWNFTKFLVDKEGHVLARYGPTTSPLSIENDIKTALGEA

SEQ ID NO: 123 - DNA, 735 bp, Glycine max
gcagagtgtagcatcctaaattaagaaaaacaaagagagaaaattgtgagaggagttttcacgtctttgagaaatgggtgcttcgctatcggtctcggaaaaatccatccatgaattcatggtcaaggatgctaagggcagagacgtgaacctcagcatctacaaagggaaggttcttcttgtagtaaatgtcgcttcaaaatgtggatttacgaataccaattacacccagttaactgagctttacagcaaatacaaagacagaggccttgagatactggcatttccatgcaaccagtttctgaagcaggagcctgggagtagccaggacgtagaggaatttgcctgcacaagatacaaggccgcgtatcccatttttggaaaggtacgtgtcaatggacctgatacagcacctgtctacaaattccttaaagcaaataaatcaggatttctgggttctaggataaagtggaatttcaccaagtttttggttgacaaggaagggaatgtcctccggcgttatggttcaaccacctcaccgttttccattgaaaatgacatcaagagagcattgtgggaggcttgaaaaactctacaatcacttcaaattggtgctcttgttgaagatgattgacacataaggaatgtatatttggagatgtttcttctagtgattatttgctaaaaaattcatgtctacgtttttttgtgtctgctgattagaaatccgttttg

SEQ ID NO: 124 - protein, 170 aa, Glycine max
MGASLSVSEKSIHEFMVKDAKGRDVNLSIYKGKVLLVVNVASKCGFTNTNYTQLTELYSKYKDRGLEILAFPCNQFLKQEPGSSQDVEEFACTRYKAAYPIFGKVRVNGPDTAPVYKFLKANKSGFLGSRIKWNFTKFLVDKEGNVLRRYGSTTSPFSIENDIKRALWEA

SEQ ID NO: 125 - DNA, 681 bp, Linum usitatissimum
ggttctgcaaaaatgtcgagcgaagaacaacagagcccgcattccatttacgatttcactgtaaagaatgctaagggacatgctgtaagtctcggtatctacaaggggaaggtcctgcttattatcaatgttgcttccaaatgtggcatgaccaactcaaactacacggagctgaatgctttgtatcacaagtacaaagatcaagggttggagatactggcattcccttgcaaccagtttggagcagaagaaccaggaaacaatgacgagattgaagaattcgtttgcagtagattcaagtccgagttccccatattcgacaagactgaggtgaatggagagaatgcatccccactgtacaagttgttgaagacagggaaatggggaattttcggcgacgacatccaatggaactttgtcaagttccttgtcaacaaacaaggccaagttgttgatcgttactacccaacaacttctcccctaagcatcgagtatgatataaagaagctgttgggagtctgaaagagagtagctatgctgatgggaaactctgtcatggggattcaattcaagcacttgttcttcagagattctttgtcattgctatcggaagtgacctgctgcttgtgtgtggtttgaaaagcctgagaaatggtgtatgatgggttgactactaatggg

SEQ ID NO: 126 - protein, 169 aa, Linum usitatissimum
MSSEEQQSPHSIYDFTVKNAKGHAVSLGIYKGKVLLIINVASKCGMTNSNYTELNALYHKYKDQGLEILAFPCNQFGAEEPGNNDEIEEFVCSRFKSEFPIFDKTEVNGENASPLYKLLKTGKWGIFGDDIQWNFVKFLVNKQGQVVDRYYPTTSPLSIEYDIKKLLGV

SEQ ID NO: 127 - DNA, 716 bp, Oryza sativa
ttcgtagatagggagagggatttcgatttttttttctccacggcgaaatccgcgaggcggaggaggaggaggagggcgagatgggggcggcggaatccgtgccggagacctccatacacgaattcaccgtcaaggattgcaacggcaaggaggtgagcctggagatgtacaaggggaaggtgctaatcgtcgtcaacgtcgcctccaaatgtgggttcacggagaccaactacacgcagctgacggagctctatcagaaacacagggacaaagattttgagattctagcatttccctgcaatcagttcttgcgacaagagccaggatctgaccagcaaataaaggattttgcttgcacaagatttaaagctgaatatcccgtttttcagaaggtgcgtgtaaatggtcctgatgctgcaccactttacaaatttttgaaagctagcaagcctggcttgtttggatctagaatcaagtggaactttaccaaatttcttattgataagaatggcaaagtcattaacagatactcgactgcgaccagtcccttgtcttttgagaaagacatcctgaaggcgctcgaggattagatctcgtaccctcccccatccttcatttgcagaagtaggcaaagtatctggttgtaatatctagacctatgggatgctcaatagtgaatttttgcaatatattccttcttttgtgtaaaaaaaaaa

SEQ ID NO: 128 - protein, 169 aa, Oryza sativa
MGAAESVPETSIHEFTVKDCNGKEVSLEMYKGKVLIVVNVASKCGFTETNYTQLTELYQKHRDKDFEILAFPCNQFLRQEPGSDQQIKDFACTRFKAEYPVFQKVRVNGPDAAPLYKFLKASKPGLFGSRIKWNFTKFLIDKNGKVINRYSTATSPLSFEKDILKALED

SEQ ID NO: 129 - DNA, 625 bp, Oryza sativa
cgtctccacgctaccgtttcgcaaccacccgcttcctcctccggagaccgctcggccgccgctcgctccagcatggccgccgcgccgtccgccacctccgtccacgacttcaccgtcaaggatgcaagcggaaaagacgtgaacctgagcacctacaaggggaaggttctcctcatcgttaacgtcgcatcccaatgtggcttaactaactccaactacactgagctgagccagctgtatgagaagtacaaggtccaaggctttgagatattggctttcccgtgcaatcagtttggagggcaggaacccggctccaatgaggagattgtccagtttgcttgcactcgcttcaaggctgagtatcccatttttgacaaggttgatgtcaacggtaacaatgctgcacccctgtacaagtatctgaagtctaacaaaggtgggcttttcggtgatagcatcaagtggaacttctccaaattcttggttgacaaggagggtcgcgtggtgcttcgttatacgcccaccacctcccctcttagaattgaggtaatgacctgcactaccacttgcaatctctttctacagcctcgacttgataggctctcattataacatttccatacta

SEQ ID NO: 130 - protein, 179 aa, Oryza sativa
MAAAPSATSVHDFTVKDASGKDVNLSTYKGKVLLIVNVASQCGLTNSNYTELSQLYEKYKVQGFEILAFPCNQFGGQEPGSNEEIVQFACTRFKAEYPIFDKVDVNGNNAAPLYKYLKSNKGGLFGDSIKWNFSKFLVDKEGRVVLRYTPTTSPLRIEVMTCTTTCNLFLQPRLDRLSL

SEQ ID NO: 131 - DNA, 1158 bp, Zea mays
cggtccggattcccgggtcgacgtttcgtaccactcgtaaccagaatcgccgcaagccaatctgtctccgccaggcgccaagccaaccctcaccaccacccgtccacccccatcagtgcatcaccgctcacagcctttactcgccaccgcagcaccccctgctcggccgcccgctcccgcgttcccacatctctctctctctggctctctgctcgccacgcgccgtaccagcgccgcgcgccacatggctccctcgttcactagcctcctctcggccgcgaactccgccgccgcctcgcggctcccctcggccgccgccggacgggcatccactttcgtgcgcttcccgcatcacccgacgggctgggctggggcctccgtcgcggcgccgcgtacggcgcgcaagcgggcacccggcgtcgcctacgccaccgcagctaccgagaagagcatctacgactacaccgttaaggacattgatggaaaagatgttcctcttaaaaagttcaagaataaggtgttgctgattgttaacgttgcttctcaatgtgggttgacaacagcaaattacactgaactatctcatatctatgagaagtacaagactcaagggtttgagatccttgcatttccttgcaatcaatttggtgcacaagaacctggatcaaatactcagattaagcagtttgcatgtacaagattcaaagctgaatttccgatttttgacaaggttgatgtcaatggacctaatacagctcccatctataaatttctgaagtccagtgctggaggatttttgggtgatctcgtgaaatggaattttgagaagttcttagtggataagaatggcaaagtcattgagagatatccaccaacaacttcacctttccagattgagaaggacatccagaaactgctcgcggcataagtacttccaagtctttcagctccgacacttcagaagttcttttgaatggcgtccctgggaaacgatttcacagcaaacgtggagtcagacaaggagatcctctgcccccttctttttgttcttgcgacagatctcctgcagtcgattgtcaacaaggcttgtgattgtggcatcctccggctccctctaccgaacacttgtggttctaatttccctattattcaatatgc

SEQ ID NO: 132 - protein, 227 aa, Zea mays
MAPSFTSLLSAANSAAASRLPSAAAGRASTFVRFPHHPTGWAGASVAAPRTARKRAPGVAYATAATEKSIYDYTVKDIDGKDVPLKKFKNKVLLIVNVASQCGLTTANYTELSHIYEKYKTQGFEILAFPCNQFGAQEPGSNTQIKQFACTRFKAEFPIFDKVDVNGPNTAPIYKFLKSSAGGFLGDLVKWNFEKFLVDKNGKVIERYPPTTSPFQIEKDIQKLLAA

SEQ ID NO: 133 - DNA, 848 bp, Zea mays
caacctcagctagtcagctccgccgcttttgctttctctctccaggctctcggcttcgtccacaagctacagccgcgcgctcctccttgacccggcctgaccccgctagttcgccgcctgccgtctgccgccccagcatggccgccgcgtcgtccgccacctccgtccacgacttcaccgtcaaggattcgagcggcaaggacgttgacctcagcgtctacagggggaaggttcttctcatcgttaacgtcgcatcccaatgtggcttaaccaactccaactacactcagcaggcccagctctatgagaagtacaagaaccaaggctttgaaatcctcgctttcccgtgcaaccagtttggtgggcaggagcctggtaccaacgaggagattgcccagtttgcctgcacacgcttcaaggctgactaccccatctttgacaaggttgatgtcaatggtaacaatgctgcgcccatctacaagtttctgaaatctagcaagggtggccttttcggcgacagcatcaagtggaacttttccaagttcttggttgacaaggaggggcgtgttgtggatcgctatgctccaaccacttcacctctgagcattgagaaggatatcaagaagctgcttgggagctcttaaacgatatctggctgcaaaactgtagaaaaaactgtatgaacattgctctgagagctgaagtatataacaatcttgtcttaataaagtagttttagtatttgagaggttgcagtacctgctttatttcccttgcatgcactctgtacttgtacttgcgacacgatccgatagaaatgatattccttttccttgcaaaaaaaaaaa

SEQ ID NO: 134 - protein, 168 aa, Zea mays
MAAASSATSVHDFTVKDSSGKDVDLSVYRGKVLLIVNVASQCGLTNSNYTQQAQLYEKYKNQGFEILAFPCNQFGGQEPGTNEEIAQFACTRFKADYPIFDKVDVNGNNAAPIYKFLKSSKGGLFGDSIKWNFSKFLVDKEGRVVDRYAPTTSPLSIEKDIKKLLGSS

SEQ ID NO: 135 - DNA, 735 bp, Zea mays
cacactctgtgcaaagaacagtaaacaagctgaagcctggatgtttgccatgcaagcaggcggacttgaattcgaaaaagttgaagaaggagaagtcaaagcaacatcattgttcgagttatctggaaatgacttaatgacaaatgaagttgttccactcagcaacttcaaaggcaaggtatgtttggttgtcaatgtatcaagcaaatgtggattaactccaaagaattatccagagcttgaacagttgtacaagacatatggtccaagaggatttgttgtgttggcattcccaacaaatcaattcgcaaatcaagaaccaggtacaccagaggatatcagaaaattggttgatggatatggagtcacatttccaatgtttgctaaaactgatgttaatggcctaactgctcatccagtgttcaagttcttgaaacaaaaccttggtggagtacttggaagttcaatcaaatggaatttcaccaagttcttatgtgacagaaatggtaaaccagtcaagagatacatgccaaccacccaaccattgtcatttgttgctgatattgaagcacttcttgatcaagaatgagaaacaagcaacacattggcacatccattgatcaagaatatataaatatttacatatgatacaacaaggcatattcaaaatgaaatcattctatatatatgattacaacatttacatttaattatttggagttataaaaaaaaaaa

SEQ ID NO: 136 - protein, 182 aa, Zea mays
MFAMQAGGLEFEKVEEGEVKATSLFELSGNDLMTNEVVPLSNFKGKVCLVVNVSSKCGLTPKNYPELEQLYKTYGPRGFVVLAFPTNQFANQEPGTPEDIRKLVDGYGVTFPMFAKTDVNGLTAHPVFKFLKQNLGGVLGSSIKWNFTKFLCDRNGKPVKRYMPTTQPLSFVADIEALLDQE

SEQ ID NO: 137 - DNA, 960 bp, Brassica napus
atggatcccaagaacccaaaccgccaccaagtaccgaacttcttgaacccaccaccaagacaccagagcataggagatgcttccaaggacgacaatcatcatcattccaaaccggccgaggttaaggattttcagatcgtggtcgcttccgacaaggaaccgaacatcagtaagaagccgccgcagcagcagcagcagcagaaccagcttggtcccaagagaagctctaacaaagacagacacatcaaagtcgaaggcaggggtcggagaatcaggatgcctgctctctgcgccgctaggatcttccaattgactagagaattgggccacaaatccgacggcgagacaatccagtggctgcttcagcaggctgagccgtcgattatcgcagccaccggttcgggaaccataccggcctctgctttagcctcggccgctgctgtatccagccaccatcttcaaggtgggtcactcactgctggtttgatgatcagtcatgagttggacggtggtggtgggtctagtagtgggaggccaaattggggtgttggcggcggagatggagtaggaggagcttctaggtcgagtttaccaacagggctgtggccaaatgtagctgggtttggagctggtgtgcagaccactgggatgatgagtgatggaggtggttacagaattgggtttcctgggtttgattatcctggtggagctatgagttttgcgtccattcttggtggtggtaataacaatcagatgcctggacttgagttagggttggctcaggaagggaatgttggtgtcttgaatccgcactcttttgcacagatttatcagcagcagatgagtcaagctcaggctcagggtagggttcttcaccatactcttctgcataacccatcacatgaggagcatcagcaagagagtggtgagaaagatgattctcaaggctccgggcgttaa

SEQ ID NO: 138 - protein, 319 aa, Brassica napus
MDPKNPNRHQVPNFLNPPPRHQSIGDASKDDNHHHSKPAEVKDFQIVVASDKEPNISKKPPQQQQQQNQLGPKRSSNKDRHIKVEGRGRRIRMPALCAARIFQLTRELGHKSDGETIQWLLQQAEPSIIAATGSGTIPASALASAAAVSSHHLQGGSLTAGLMISHELDGGGGSSSGRPNWGVGGGDGVGGASRSSLPTGLWPNVAGFGAGVQTTGMMSDGGGYRIGFPGFDYPGGAMSFASILGGGNNNQMPGLELGLAQEGNVGVLNPHSFAQIYQQQMSQAQAQGRVLHHTLLHNPSHEEHQQESGEKDDSQGSGR

SEQ ID NO: 139 - DNA, 936 bp, Brassica napus
atggatcccaagaacccaaatcgtcaccaagtaccaaactttttgaacccaccaccaagaaaccagagcttaggagatgcttccaaggacgacaaccatcattccaaaccggctgaggttaaggattttcagatcgtggtcgcttccgacaaagaaccgaacaagaagccgcagcagcagcagaaccagcttggtcctaagagaagctctaacaaagacagacacatcaaagtggaaggcaggggtcggagaatcaggatgcctgctctctgcgccgctaggatcttccaattgactagagaattgggtcacaaatccgacggcgagacaatccagtggctgcttcagcaggctgagccgtcgattatcgcagccaccggttcaggaactataccggcctctgctttagcctcagccgctgctgctgtatcgagccaccatcttcagggtggtgggtctctcactgctggtttgatgatcagtcatgagttggatggtgggtctagtagtgggagaccaaattggggtgttggcgggggagatggagggtctaggtcgagtttaccaacggggctgtggccaaatgtagctgggtttggagctggggtgcagaccatgagtgatggaggtggttacaggattgggtttcctgggtttgattatcctggtggagctatgagttttgcatccattcttggtggtggtagtaacaatcagatgcctggacttgagttagggttggctcaggaagggaatgttggtgtcttgaatcctcagtcttttgcacagatttatcagcagcagatgagtcaggctcaggctcaggctcaagctcagggtagggttcttcaccatactcttcagcataacccatcacatgaggagcatcagcaagagagtggtgagaaagatgattctcaagggtcagggcgttaa

SEQ ID NO: 140 - protein, 311 aa, Brassica napus
MDPKNPNRHQVPNFLNPPPRNQSLGDASKDDNHHSKPAEVKDFQIVVASDKEPNKKPQQQQNQLGPKRSSNKDRHIKVEGRGRRIRMPALCAARIFQLTRELGHKSDGETIQWLLQQAEPSIIAATGSGTIPASALASAAAAVSSHHLQGGGSLTAGLMISHELDGGSSSGRPNWGVGGGDGGSRSSLPTGLWPNVAGFGAGVQTMSDGGGYRIGFPGFDYPGGAMSFASILGGGSNNQMPGLELGLAQEGNVGVLNPQSFAQIYQQQMSQAQAQAQAQGRVLHHTLQHNPSHEEHQQESGEKDDSQGSGR

SEQ ID NO: 141 - DNA, 1556 bp, Zea mays
atggacgtcgccggcgacggcggaggcggccgccgccccaacttccctctgcagctcctggagaagaaagaggagcagccgtgctccatctccgctgcggtgggcgcgtcagcgggaggcaacgggaatggatcgggggccgtcggaggtgagatgcagcaggtgcggaaggcggcacccaagcggagctccaccaaggaccggcacaccaaggtggagggcagggggcgtcgcatccggatgccagcgctgtgcgcggcccgggtgttccagctgacgcgggagctcgggcacaagacggacggcgagaccatcgagtggctgctgcagcaggccgagccggcggtgatcgcggccaccggcaccggcaccatcccggccaacttcacctccctcaacatctccctccgctcctcgggctcctccttctccgccccggcccacctacgcgccgccttgcctgctagccccgccaccgcagcccggttcggccgtgctgacgcgtgggaccgggttgtcggccttgccttcccttcggagggcccggcctcgtcatcttcgtcgccgtcgcctttgttgcttaatttcaactccggcagcgtcggtcttgacgcgcaacagtcgccgtctgccgcggctgcagccgcagccgccgatatgacaaggaagaggcggtgggaacaagaaatgcagcagcagcagcagcagcaagcgcagcaatatcagcagcagatggcggggtacacgcagagccaaatgccgggcaccgtgtggatggtgccgagcagcaacaacacgcagggtggtggtacaccttccagcggcggcagtggcggatgcaccggcgagtctatctggacgttcccgcagatgggcagcgccaccgccgcggctgccgtgtaccgggggagcgtgccgagcgggctacatttcatgaacttccccgcaccggtggcgctgcttccagggcagcagcttgggctcggctccgtgggaggcggcggcggcggcagcggaggcggcagcggaggcgaggggcacatggggatcctcgccgccctcaatgcgtaccggacacaggtggtaacggatcccgcggccagtcagggcgggggaggtggaggcggcgggtctggccagcagcagcagcacggtggcgggcgcggcgaccggcacgagagcatgagcaccagcgactcgtagccgccgacgggggagtcgtcaccgaggataccatgcatcgctctggtgtggcttttgatctgttctttgtcttggtttcatttttttttcttgctttcctttttgtggtttccttcctctctcatccaagctagacgagacgatacacccctgcgagaggattacacttagctgcactactccatggtatgcggtaggatcagaatccttacgtgagctgtacgattgttcatgggaagaagagaggagggaaaacacagcagcagcagagagagattgttcattttgttctttagttttagggtttgcattgatcaagtgcgagcagaagagatttttatcaaccaaaaaaa

SEQ ID NO: 142 - protein, 400 aa, Zea mays
MDVAGDGGGGRRPNFPLQLLEKKEEQPCSISAAVGASAGGNGNGSGAVGGEMQQVRKAAPKRSSTKDRHTKVEGRGRRIRMPALCAARVFQLTRELGHKTDGETIEWLLQQAEPAVIAATGTGTIPANFTSLNISLRSSGSSFSAPAHLRAALPASPATAARFGRADAWDRVVGLAFPSEGPASSSSSPSPLLLNFNSGSVGLDAQQSPSAAAAAAAADMTRKRRWEQEMQQQQQQQAQQYQQQMAGYTQSQMPGTVWMVPSSNNTQGGGTPSSGGSGGCTGESIWTFPQMGSATAAAAVYRGSVPSGLHFMNFPAPVALLPGQQLGLGSVGGGGGGSGGGSGGEGHMGILAALNAYRTQVVTDPAASQGGGGGGGGSGQQQQHGGGRGDRHESMSTSDS

SEQ ID NO: 143 - DNA, 1194 bp, Brassica napus
gctcacataaagatctaatagagaccatcacaaccccaccacaaccatctttgatcatcatcatcatcatcaatatggatcctgatccagatcatcatcaaagaccaaacttccctctccagcttcttgattcttcttcctcctcttccacttccttagctatcatcccatcagcttcgtcttccgaacctaactccgaccctaacgttctctccaagaaaccacctccaaagcgaacctcaacaaaggacagacacaccaaagtcgaaggccggggccgtaggatccgtatgccggccatgtgcgccgcacgtgtctttcagctcacacgcgagctcggtcataaatccgacggtgaaaccatcgagtggcttctccagcaagctgaaccggcggttatagccgctacggggactggaaccattccggctaacttcacttctcttaatatctcacttcgtagctcaagatcctctctctctgctgctcatcttcgtacaactccgagcaactattacttccactcgcctgcgatggctcaacatcatcatcagcagcagcttcaccaggtgcgtcccaagaatgagtcggattcttgttcttcttctcagctcgtagatcacaaccagatggggaattatctagtacagtcaacggctggatctttgcctactagccagactcctgccacggcgccgttttggagtagtggtgataatacgcagaatctatgggcttttcatcattccggtgacgtttacaacacaagcagcggtggtggtggtggtggcggtggagcggggggtggaggaggagtacatttgatgaacttcccagcgccgtttgctttgttttccggacagcctttggcgtctggttatggaggaggtggtggaggaggaggagaacataaccattacggagttttgtcggcgttgaacgctgcgtaccggccggttcaggagacggcaaaccagcaaaaccatggagatcatcatcacaaccatcaagaagatggaagcacaagtcatcattcctaggccaaaaaaacacacacaaacaatatatctgtgagatttattttattttttatgtcctttcgtttgtttgattgtttttaaacaagcgtgttttgttttgttttgcattgcctttttcatatggagtattttttttcttaaaaaaaaaaaaaaa

SEQ ID NO: 144 - protein, 321 aa, Brassica napus
MDPDPDHHQRPNFPLQLLDSSSSSSTSLAIIPSASSSEPNSDPNVLSKKPPPKRTSTKDRHTKVEGRGRRIRMPAMCAARVFQLTRELGHKSDGETIEWLLQQAEPAVIAATGTGTIPANFTSLNISLRSSRSSLSAAHLRTTPSNYYFHSPAMAQHHHQQQLHQVRPKNESDSCSSSQLVDHNQMGNYLVQSTAGSLPTSQTPATAPFWSSGDNTQNLWAFHHSGDVYNTSSGGGGGGGGAGGGGGVHLMNFPAPFALFSGQPLASGYGGGGGGGGEHNHYGVLSALNAAYRPVQETANQQNHGDHHHNHQEDGSTSHHS

SEQ ID NO: 145 - DNA, 1750 bp, Brassica napus
cttagagcacttttatggcattggagcacttgtgcagcaacctctgtttccttgtattagggaaacaactagagcttctcctcctcctcaacattggtttgagtcttctcctcattaacaggacaccctaaccaaatctgttgaaagcttttctctgtgattgagaacaatatggtttcctctgagtgtcctgttgccaacaaaaacgtgaccgggaaacacctgtttctaaccatcaccccaccacaagctgtcttgaaagaaaacctcgagcttgacttctctgacgtctttggtccactccccgaagaccccaccgacgtcgctttcgacgagcctgctgttatccacagccgatcccactccttggttggaccctctctgatcactagtcattctttcaagctcagcaagcttaccttacgagagaccaacgactctgttgacttggtggaatgtctcgaagaaggtgaatcctcttgtaactccgacaccgaagctgtgtccaaagtctcgggtggtgtggtaggtatcgaggactttgaggttttgaaggttgtgggacaaggtgcgtttgggaaagtgtaccaggtgaggaagaaggagagttccgagatttacgcgatgaaggttatgaggaaagataagattatggagaagaatcatgctgagtatatgaaggctgagcgtgatattcttacgaagattgatcatcctttcattgttcagcttaagtactcttttcagactaagtataggctctatcttgtgcttgactttatcaacggagggcatcttttcttccagctctatcaccaagggcttttcagagaggatttggctcgggtgtacactgcggagatcgtctctgcagtttcccatctccatgagaatgggataatgcatagggatctgaaaccggagaacatactaatggacactgatggtcacgtgatgctaactgattttggattagcaaaggagtttgaagagaacaaaagatcaaactcaatgtgtgggactactgagtatatggcacctgagatcgttagaggaaaggggcatgataaggctgctgactggtggagtgttgggattctcctctatgagatgctcactgggaagccaccgtttcttgggagcaaagggaagatacagcagaaaatagtcaaggacaagatcaagcttccacagtttctgtcaaatgaagctcatgcgttgctgaaagggttgctgcaaaaagagccagagagaagacttggaagcggaccgagcggagcagaggagataaaagggcacaaatggttcaagggaatgaactggaagaagctggaggcaagagaagtgaagccaagtttcaagccggaggtatctgggaggcaatgcatagcgaattttgacaagtgttggactgatatgtctgtgctggattcgccagcaagcagtcctagctcggatcctaaggccaacccttttaccaacttcacatacgtcaggcctcctcattcattcctcaaccaaaccacatcgacttcgtagaggaaagatgggtttatggaaatacattgtttttatgtttgataaaaagatacataatctgatcttgtgtttctattatttcttctcatgcttgtcaaaaccattgtggttgtttctttctcaacatgtacattcgtttttaccttttcatcaaactgtatttatactattaaactaatcaagttagagtgcatgcaaaaaaaaaaaaaaa

SEQ ID NO: 146 - protein, 455 aa, Brassica napus
MVSSECPVANKNVTGKHLFLTITPPQAVLKENLELDFSDVFGPLPEDPTDVAFDEPAVIHSRSHSLVGPSLITSHSFKLSKLTLRETNDSVDLVECLEEGESSCNSDTEAVSKVSGGVVGIEDFEVLKVVGQGAFGKVYQVRKKESSEIYAMKVMRKDKIMEKNHAEYMKAERDILTKIDHPFIVQLKYSFQTKYRLYLVLDFINGGHLFFQLYHQGLFREDLARVYTAEIVSAVSHLHENGIMHRDLKPENILMDTDGHVMLTDFGLAKEFEENKRSNSMCGTTEYMAPEIVRGKGHDKAADWWSVGILLYEMLTGKPPFLGSKGKIQQKIVKDKIKLPQFLSNEAHALLKGLLQKEPERRLGSGPSGAEEIKGHKWFKGMNWKKLEAREVKPSFKPEVSGRQCIANFDKCWTDMSVLDSPASSPSSDPKANPFTNFTYVRPPHSFLNQTTSTS

SEQ ID NO: 147 - DNA, 2019 bp, Glycine max
aatattcctcaaaacaacgcattcctttcactgccccttcccaattcccttccctgattgtcaattggatcttcatgagttcaacaaccactggagcatacttcgtttcctgtgttgcgggaaacaagaacaacgacctcttctgctgggttttgctctgcttgctgccaaaatttttgggaactccatttgcctacatcaactttctcttgattcaggccattgacaggaatccatcggcggtggaggttttgggaaacttcggggtggttaacctatagtctttattagtttggtcgtcagcagcagcatatttagatcccttattgttgagtggtgtgagaaatggtgtcctctcagttttctgcttttactttggctggctacaaaccgtctcagactcagttactctttcctgcaaagcttgttgatactgtgaacacagagcatattgagctggatttctctgatgtctttggtcctgttacgttagatttgaataacattgattccactaccagtgagcctatggaagaagtgaacgagctggtttatgatgacccaccagtgatttacactcgctcacattctctggttggcccttcaacttgtgttagtcaatcacttaagcttggcaaactcaccatacatgagactgaggattcattggaactagtggagcatgtcaatggagaggccattaaagacatcaaagaatcttcctttgttgaggaatcattgaaagatgaagatgggaatctcatgaagatccacagagttagcattgacgatttcgagattttgaaggttgttgggcagggtgcatttgcaaaagtttatcaggtgaggaaaaagggtacttctgaaatatatgctatgaaggttatgcggaaggacaagattatggagaagaaccatgctgaatacatgaaagctgagagggatatttggacaaagatagaacacccatttgttgttcaactcagatactcttttcagacaaaatacagactgtatcttgtgctggattttgtaaatgggggccatctctttttccagctttatcaccaaggccttttcagagaggatctagcacgcatatatacagctgagattgtttctgcagtttcccatctccatgcaaatggaataatgcatagggatctaaagcctgaaaatatcctactggatgctgatggccatgttatgttgactgattttggcttagctaaacaatttgaagagagtacaagatcaaattcgatgtgtggtacattagagtacatggcacctgaaattattcttggcaaaggccatgataaggctgctgattggtggagtgtaggtgttctactgtttgagatgcttactggaaagccgcctttctgtggtggaaaccgtgacaaaattcagcagaagatagttaaagacaagattaagctgccagcatttttgtcaagtgaagcacattcactgttgaaagggctgctacagaaggaacaagctaggcgcttaggttgtggacctcggggtgttgaggaaattaaaagccacaagtggtttaaaccaatcaattggagaaagttggaagcaagagaaatccaaccaagctttaggccagaagtagctggtgtgcactgtgttgccaactttgagaagcgctggactgatatgcctgttgtggactcaccagctgccagcccaaatggtggaaacccctttaaggatttctcttatgtgaggcctgcagcctcttttcttcaaaggaataaccctgcttactagccagcttgaaatggcgttggcttaagatgccaacatgaaacattttcatgtgcccttgacttgtgtgaactttgcaggttgtgggttcattcacttattatgtgcaccttgctgcggctctctgcaaatgtattgagctgtcatgtatgcagaaaataaattactttatttataagtggtatcttctattagggacaaaaaaaaacaaaaaagagagagagagaccgacacgca

SEQ ID NO: 148 - protein, 479 aa, Glycine max
MVSSQFSAFTLAGYKPSQTQLLFPAKLVDTVNTEHIELDFSDVFGPVTLDLNNIDSTTSEPMEEVNELVYDDPPVIYTRSHSLVGPSTCVSQSLKLGKLTIHETEDSLELVEHVNGEAIKDIKESSFVEESLKDEDGNLMKIHRVSIDDFEILKVVGQGAFAKVYQVRKKGTSEIYAMKVMRKDKIMEKNHAEYMKAERDIWTKIEHPFVVQLRYSFQTKYRLYLVLDFVNGGHLFFQLYHQGLFREDLARIYTAEIVSAVSHLHANGIMHRDLKPENILLDADGHVMLTDFGLAKQFEESTRSNSMCGTLEYMAPEIILGKGHDKAADWWSVGVLLFEMLTGKPPFCGGNRDKIQQKIVKDKIKLPAFLSSEAHSLLKGLLQKEQARRLGCGPRGVEEIKSHKWFKPINWRKLEAREIQPSFRPEVAGVHCVANFEKRWTDMPVVDSPAASPNGGNPFKDFSYVRPAASFLQRNNPAY

SEQ ID NO: 149 - DNA, 1684 bp, Zea mays
ggtcgacttcgctgtcgacgatttcgtgccattgggagctgcatagctaaattgtggcccaagacttcctagtcatcttgtggaatcttataggttctcgaagatggtttcctctgagataacctctgttacagcagcgcgtgcacagggccccaagctttttagagggaagatacttctgccagggggccccccagatgttgtgccttctgaaaatgttgagttcgacttttctgatgtttttgggcctagtgcagtccagactcacacagaagtgagtattctcactcctgacagtccagcaccggtggctgagtccaacgatgaggtttacaatgaccctgatgtcattgtcaaacgatctcattctcttgttggtccatcatctcttgttagccagtctttgccatttagcaagcttacattacacaagacagagagtccattggaactttcagagtgcccttccaaaggaaaacaaatcaaccaagggtcccttagcgatgatgagtttgatgatgtaaaaaaggagaatgagggcgttggactagatgacttcgaagttctgaagctcgttggccaaggggcatttggcaaagtatatcaggtgagaaagaaaggtacatctgaaatatatgcaatgaaagttatgaggaaggacaagattgtggagaagaatcatgctgagtacatgaaagctgagagagatatacttacaaaggttgaccatccttttgtcgtgcagctgaggtactcctttcagacgaagtaccgactttaccttgtcctggacttcataaatgggggccatctcttcttccagctttaccaccagggtttatttagggaggagcttgcacgcatctacgctgctgaaattgtatctgccgtagcccacctccatgccaatggtattatgcatagagatttgaagcctgagaacatcttactggatgctgatggtcatgctatgctgaccgactttggcatggcaaaagaatttgatgaaaacactagatcaaactcaatgtgtggtactgttgagtacatggccccagaaatttttcagggccgaggtcatgataaggctgcagactggtggagtgtgggaatccttctttttgaaatgcttacgggaaagccaccgtttgttggtggaaacagatgcaagattcaacagaagatagtaaaggagaagataaagctgccaacttatttatctagtgaagttcactctctgttgaaaggattactgcacaaagaagctggcaggcggctgggaagcggaccaggcggcagtgatgaaatccagaagcacaagtggttcaagtctgtaaactggaagagactcgaggcccggcagatcgagccaagcttccggccgaatgttgctggcaagacctgcatcgcaaactttgacaagtgctggacgaacatgtccgtgcttgactctccagtggccagccctgttgcagccaacagcaactttgtggggtacagttatgtgaggcccgcaccgttcctccaaaagccgagcccacttggctgaggaactgcttccgtggtctgagatctgccccggagttcaaatatttatctttttgactccgaatcctatgtatttcatcaagacactagtgttggagatctaaccttattgaggacaacaacttggttggtgatt

SEQ ID NO: 150 - protein, 481 aa, Zea mays
MVSSEITSVTAARAQGPKLFRGKILLPGGPPDVVPSENVEFDFSDVFGPSAVQTHTEVSILTPDSPAPVAESNDEVYNDPDVIVKRSHSLVGPSSLVSQSLPFSKLTLHKTESPLELSECPSKGKQINQGSLSDDEFDDVKKENEGVGLDDFEVLKLVGQGAFGKVYQVRKKGTSEIYAMKVMRKDKIVEKNHAEYMKAERDILTKVDHPFVVQLRYSFQTKYRLYLVLDFINGGHLFFQLYHQGLFREELARIYAAEIVSAVAHLHANGIMHRDLKPENILLDADGHAMLTDFGMAKEFDENTRSNSMCGTVEYMAPEIFQGRGHDKAADWWSVGILLFEMLTGKPPFVGGNRCKIQQKIVKEKIKLPTYLSSEVHSLLKGLLHKEAGRRLGSGPGGSDEIQKHKWFKSVNWKRLEARQIEPSFRPNVAGKTCIANFDKCWTNMSVLDSPVASPVAANSNFVGYSYVRPAPFLQKPSPLG

SEQ ID NO: 151 - DNA, 1226 bp, Glycine max
ccggtagccgctgtgttggtgagtgagttgtggtgcttttgaaagatgaggccgattctgatgaaaggtcatgagaggccattgacgttcctgaaatacaacagggacggcgatctcctcttctcctgcgccaaggaccacaaccctaccgtctggtttgccgacaacggcgaacgcttgggcacttatcgcggccacaacggcgccgtttggacctgcgacgtctcaagagattcggctcgactcatcacgggaagtgccgatcagaccgccaagctatgggacgtgcaaagcggcctgcaattatacaccttcaacttcgattccccggccaggtccgtcgatttctctgtcggcgataagctcgccgttatcaccactgaccccttcatggagttgccctccgcaatccatgtcaaacgcatcgctaacgatccatcccaacagatcggggaatctgtgcttctcattaagggtcctcagggaaggattaacagagctatctggggaccccttaacacaaccattatcagtgctggcgaagatgctgttattcgtatttgggattccgagaccggaaaactgcttcaagagtccgacaaggaatctggccataaaaagactgtaacttcacttgctaagtctgccgatgattcacatttccttactggttcccttgataagtctgccaggctttgggatactaggtcattgactcttatcaagacctatgtcacagaacgcccagtcaatgcagttaccatgtcacctcttcttgatcatgtggttattggaggtggtcaggatgcctcagctgttacaactactgatcatcgtgctggcaaattcgaagccaaattctttgacaagattcttcaagaagaaattgggggtgtgaaaggccactttggaccaattaatgcattggcttttaaccctgatggaaaaagtttttcaagtggaggtgaagatggttatgtacggttgcaccacttcgacccagattatttcaacatcaaaatttagtgcctgatggtttgtggttaaaattaggtggttcctagaagttagcttttaattattctcaaccaacatttttgtaatgcgatgctccctatattggtaatatggaagaatttttttttaatgaatttatgcatttttggtttatgttgtatcgacatggtcaattttggttggagtggcactcttaattaaggagtttt

SEQ ID NO: 152 - protein, 326 aa, Glycine max
MRPILMKGHERPLTFLKYNRDGDLLFSCAKDHNPTVWFADNGERLGTYRGHNGAVWTCDVSRDSARLITGSADQTAKLWDVQSGLQLYTFNFDSPARSVDFSVGDKLAVITTDPFMELPSAIHVKRIANDPSQQIGESVLLIKGPQGRINRAIWGPLNTTIISAGEDAVIRIWDSETGKLLQESDKESGHKKTVTSLAKSADDSHFLTGSLDKSARLWDTRSLTLIKTYVTERPVNAVTMSPLLDHVVIGGGQDASAVTTTDHRAGKFEAKFFDKILQEEIGGVKGHFGPINALAFNPDGKSFSSGGEDGYVRLHHFDPDYFNIKI

SEQ ID NO: 153 - DNA, 1271 bp, Zea mays
ccgaggccttcgctggttactagcaccgccccagctccttctcccttttccggcggaggtgaacaccgccaccactagagcgccacgatgaggccgatcctgatgaagggccacgagcgcccgctgacgttcctgcgctacaaccgcgacggggacctcctgttctcctgcgctaaggaccacacccccacggtctggtacgccgacaacggcgatcgcctcggcacctaccgcggccacaacggcgccgtctggacctgcgacgtctcccgcgactcggcgcgcctcattaccggatccgccgaccagaccgcaaagctatgggaggtcagcacggggaaggagctcttcagctttcgtttcgacgcgcccgccaggtccgtcgagttcgccatcggggacgcgctcgccgtcgtcaccaccgacaacttcatggaccacgttcccaccgttcaggtcaagcgcatcgccgaggacatcgacgaccagacggaggagtctgcactcgtcatcaccggcatcaagggaaggatcaacagggccgtttggggcccgctgaacaggaccattatcactgccggggaggatgccaccattcgcatctgggactcagagactggacagctgctgaaagagtctgataaagaatctggacatcagaagaccatttcatcgttgtcaaaatccttggactggtcgcattttatcactggctccttggataaatctgcaaagctatgggatacaagaacgctaaccctgatcaagacgtatgtcacagagagacctgttaatgctgttgacatctctcccactcatgatactgtggttctaggaggtggtcaggatgcaatgaatgtgactatgacagatcgccgtgctggtaaattcgaggctaaattctatcacaagattttgcaagaggaaattggtggtgttaaaggacattttgggccaattaatgctttggcatttaatcctgatgggcggagtttttcaagtggcggtgaagatggttatgtaaggctgcatcattttgattccgactacttcagcatcaagatgtagataaagaacaccagactaacccgaggtgatacttcagctgtcagctatttgtgagaatttgtttgctaattttgttatcgcttgcttacctatgtgtaattgtttgggttactgtaacacgtgtcagctgcatcactggtctgttgcaacaaatggcaacgctgaagtatcctaagaaatccatttcttgcgaaaaaaaaaaa

SEQ ID NO: 154 - protein, 326 aa, Zea mays
MRPILMKGHERPLTFLRYNRDGDLLFSCAKDHTPTVWYADNGDRLGTYRGHNGAVWTCDVSRDSARLITGSADQTAKLWEVSTGKELFSFRFDAPARSVEFAIGDALAVVTTDNFMDHVPTVQVKRIAEDIDDQTEESALVITGIKGRINRAVWGPLNRTIITAGEDATIRIWDSETGQLLKESDKESGHQKTISSLSKSLDWSHFITGSLDKSAKLWDTRTLTLIKTYVTERPVNAVDISPTHDTVVLGGGQDAMNVTMTDRRAGKFEAKFYHKILQEEIGGVKGHFGPINALAFNPDGRSFSSGGEDGYVRLHHFDSDYFSIKM

SEQ ID NO: 155 - DNA, 1241 bp, Glycine max
ggaaagatgagaccaattttgatgaaaggtcatgagaggccattgacgttcctgaaatacaacagggacggcgatctcctcttctcctgcgccaaggaccacaacccaaccgtctggtttgccgacaatggcgaacgcttgggcacttatcgcggccacaacggcgccgtttggacctgcgacgtctcaagagattcggttcgtctgatcacgggtagtgccgatcagaccgccaagctatgggacgtgcaaagcggtctgcaattgtacaccttcaatttcgattcccctgccaggtccgtcgatttctccgtcggtgataggctggccgttatcaccaccgaccccttcatggagttatcctctgcaatccatgtcaaacgcattgctgacgatccaaccgagcagagtggggagtctctgcttctcattaagggtcctctgggaaggataaacagagctatttggggacccctcaacagtaccattattagtgccggggaagatgctgttattcgtatttgggattccgagaccggaaaactgcttaaagagtccgacaaggaatctggccataaaaagactgtaacttcgcttgccaagtctgccgatgattcacatttccttactggttcccttgataagtctgctaggctttgggatactaggtcattgactcttatcaagacctatgtcacggaacgccctgtcaatgcagttacgatgtcacctcttcttgatcatgtggttattggaggtggtcaggatgcgtcagctgttacaactactgatcatcgtgctggcaaatttgaagccaaattctttgacaagattcttcaagaagaaattgggggtgtgaaaggccattttggaccaattaatgcattggcttttaaccctgatggaaaaagtttttcaagtggaggtgaagatggttatgtacggttgcaccacttcgacccagattatttcaacatcaaaatatagtgcctgatggtttgtggttaaaattaggtggttcctagaagttagcatttaattattctcaaccaacatttaattatatattggtaatatggaagagttttttttttaaatgaaattatgcatttttggcttatgttgtattaacattattatcatttttggttggagtggcactcttaattaaggagtttttcttcccacgtcacaagattttgacaatattagaagtatggcatatattaggcgtaaaaaaa

SEQ ID NO: 156 - protein, 326 aa, Glycine max
MRPILMKGHERPLTFLKYNRDGDLLFSCAKDHNPTVWFADNGERLGTYRGHNGAVWTCDVSRDSVRLITGSADQTAKLWDVQSGLQLYTFNFDSPARSVDFSVGDRLAVITTDPFMELSSAIHVKRIADDPTEQSGESLLLIKGPLGRINRAIWGPLNSTIISAGEDAVIRIWDSETGKLLKESDKESGHKKTVTSLAKSADDSHFLTGSLDKSARLWDTRSLTLIKTYVTERPVNAVTMSPLLDHVVIGGGQDASAVTTTDHRAGKFEAKFFDKILQEEIGGVKGHFGPINALAFNPDGKSFSSGGEDGYVRLHHFDPDYFNIKI

SEQ ID NO: 157 - DNA, 1044 bp, Arabidopsis thaliana
atgttgacctcttcttgctcttcttcgtctctcctctgccatcgcccagctctctctagttcgcgttccaagtttagggttccttgtcgaactgttttctctcctgctcttaccaagatttcccctttaactgcttcttcaccttctaagtccgccaagcataaatggaagattttgtgttttagaaatgaagattctgctcccgagaatccggagcattttgtgcctgaggaattagttaagccagatcaagattctccatgtacagataaaacagattggaaggcaacttttcaaaaggctgcagatgcagttttgaaggccattgggactcgttggaaggtaccatggactgtcgagaccattgtgcaggtaatgcttctgtgggtagccgctttctggttcattggttcatggatgatcccattcatggctcatatatcaggtttccacaaagaatccctaacatttagaggccaagctttgttcagtctgataaccgatgtaacagaaggcctagccgggattgctatcctccaccgttgcctctccatgttccgtccacttgcaagtgattggttccgctttacccttaaaggaaactggcaactagatgttatcataggctgtttcatgttccctttcgttaaccggctctcccaattaaacctaaacctcttgccactcccaccaacctcaagtccagtctcactctcaagtgtcgagcagtctataatggctagagaccctgtggcaatggcactgtatgcagttgtagtatcaatttgtgcaccggtttgggaagagatagtgttcagagggttcttgttaccgtctctaactaggtacatgccagtttggtgtgcgattcttgtgagttcgattgcatttgctttggcacatttcaatgtgcagaggatgttaccattggtgttccttggagtggtattgggtttgatattcgcaaggtcaaggaacttgttaccttcaatgctgttgcatagcttgtggaacggctttgtattcatggaattgatgcgatga

SEQ ID NO: 158 - protein, 347 aa, Arabidopsis thaliana
MLTSSCSSSSLLCHRPALSSSRSKFRVPCRTVFSPALTKISPLTASSPSKSAKHKWKILCFRNEDSAPENPEHFVPEELVKPDQDSPCTDKTDWKATFQKAADAVLKAIGTRWKVPWTVETIVQVMLLWVAAFWFIGSWMIPFMAHISGFHKESLTFRGQALFSLITDVTEGLAGIAILHRCLSMFRPLASDWFRFTLKGNWQLDVIIGCFMFPFVNRLSQLNLNLLPLPPTSSPVSLSSVEQSIMARDPVAMALYAVVVSICAPVWEEIVFRGFLLPSLTRYMPVWCAILVSSIAFALAHFNVQRMLPLVFLGVVLGLIFARSRNLLPSMLLHSLWNGFVFMELMR

SEQ ID NO: 159 - DNA, 1224 bp, Brassica napus
ggtttcgcagatgatctcgtgtttatctaaatcttcgtctcttttctgcatctccggttcccggagtttaatcccgccgaagacttacaaccgcggcggtttgtgccggttttctccgggatttgcaagccgccggttatctacggtttaccgtagaaaatggagatcagcgtgcatttccaactctgggaaagaaactgaaggagagggaaagttacaaggaggtgggtcagagtggcggatacttgagagatgggaagtgccatgggaatggcagacagtttcgttaacttcgcttgcttgtggtttaagttttgttttgacagggttaactgagatggtagccttaccatatctagggatcgacgttcagaagctgagcttggacgacaaggcggagatcttattcctggatcaaggtttaacaactctagcagtacttgctgttatattcaccgttgctaaaacattcgagccgcttcctgaagacattttgcgctatgatttgaaacagccctttaacttgcaaaaaggatggctggtgtggagtgggataggtctggttggagctgttggggctattgcgttaacaggtgttgctttatccttgtttaggacagagacaccagaaagagaggtggactctttgatgaagcttctcccattaatcggatcctcaaacataagcacgttaagcttagtggggataactggagtccttgctccacttcttgaggagacggtgtttcgcggattcttcatggtctctcttaccaaatgggtgccgactccaatagcgatcatcatcagctcagctgcgtttgcacttgcgcacctcacacccggtgaattcccgcagctgtttatactaggatcggttttgggtttatcgtatgcgcaaacccgcaatctcattaccccgatggtcatacacggtttctggaactcgggagttgtcttactgctcacttttcttcaggtccaaggttatgacatcaaggaactgttattgcagggaaactagctttgctcttcctttctgtccgcagttaacatgtaaaagcttcttgtacgatgctggatcttagtaaattttgtttgtattcgaccaaagaattcaaaacttgatgcaagagtttgagtattgagcaacagaatgtcactgaaaagctcaatgctaaaattacaaaaggaaaaaaaaaaaaaaaaagagaccgacacgca

SEQ ID NO: 160 - protein, 337 aa, Brassica napus
MISCLSKSSSLFCISGSRSLIPPKTYNRGGLCRFSPGFASRRLSTVYRRKWRSACISNSGKETEGEGKLQGGGSEWRILERWEVPWEWQTVSLTSLACGLSFVLTGLTEMVALPYLGIDVQKLSLDDKAEILFLDQGLTTLAVLAVIFTVAKTFEPLPEDILRYDLKQPFNLQKGWLVWSGIGLVGAVGAIALTGVALSLFRTETPEREVDSLMKLLPLIGSSNISTLSLVGITGVLAPLLEETVFRGFFMVSLTKWVPTPIAIIISSAAFALAHLTPGEFPQLFILGSVLGLSYAQTRNLITPMVIHGFWNSGVVLLLTFLQVQGYDIKELLLQGN

SEQ ID NO: 161 - DNA, 1564 bp, Zea mays
cctggatctgccactgctccacggcattgtgcgaagccgcgtcgccagagggatcaagaggcctggcctggagtcgtcagcgtggtggcgcctcctccaccccacagcacccatgtcctccgcctcgtgcctcgtccatcccgctccaaggttccgggttcggctcctgcctctcccctcctccgtcgccgcgaggccgttgcttggcttcaggcctcggtgtggggctccagcgaagggatgggcattgtggcacgtctcatgcttcagaaatggtcaggatgggccaacaacatctgacgaaggtgatgacttcaagtatgttgcccaatcacagagctctggtggtgcagaggtgaaaaaggaagtggtgagtagcttaaacggggagcaggagcagaatttgaaggacgacgattggttcctgcaactgcagaagataaaagaaaatttactaggcaggatagtaaaatttcagacagaacgctggatagtaccttggactggacaaaccattgctcaggtgatgattttatggattgccacattttggtttgtgggttcctggatagtgccattgttggctcatgctgctgggtttagcaaggaaacattgacgcacagaggccaggcactatacagtctcttgacagacataacagagggccttgccgggatcgcaatccttcaccaatgccttggtagattccggccccttcctccagggtggttcgagttcaatctgaagggcaaatggcacttggacgtagcatttgggtgcctgctattcccactagttaatctactctcacacataaacatcagcctagttccagcgtcaccaggtccagctgtcggggtttccagcgtagaacagtccatcgtggcccgggatccagtggcaatggctttgtatgctgtggtagtcacggtatgcgcgcctatatgggaagaaatcgtgttccgaggattccttctcccgtctctaacacggtacatgccactcccatggtcgatcctagcgagcgccgctgcgttcgcgctcgctcacttcaacgcacagagggtgatgccgctagtgtttcttggagtggtgatgggaggagtctttgcaaggtcgcgcaacctgctggcgtcgatggtgctgcacagcttgtggaatggatttgtgttcttggatttgatgaagtgagcagctgagctggagttattgtttcggttccaaccttggacatatctgcttgagcctcgtctgaaaatgttttggacaagattggttctattcttttttcaggattaaaagcaaggcatctaatgcagcggcggaacagaaggaatcgtgtaagtctgaagcgaagagataacaatttgtgcaggaaaatagaccacagaacagaagaaatgtttatttttttgagaattttatgtagaatgatcagtcgctgcagtcttaggacctgtgcccagcttccataagcatctgccacatttttgtaaattacataggcgggagaatatttgtctcgtcgtgtatagaatttcccccctggaaaggaaaaaaaaa

SEQ ID NO: 162 - protein, 359 aa, Zea mays
MSSASCLVHPAPRFRVRLLPLPSSVAARPLLGFRPRCGAPAKGWALWHVSCFRNGQDGPTTSDEGDDFKYVAQSQSSGGAEVKKEVVSSLNGEQEQNLKDDDWFLQLQKIKENLLGRIVKFQTERWIVPWTGQTIAQVMILWIATFWFVGSWIVPLLAHAAGFSKETLTHRGQALYSLLTDITEGLAGIAILHQCLGRFRPLPPGWFEFNLKGKWHLDVAFGCLLFPLVNLLSHINISLVPASPGPAVGVSSVEQSIVARDPVAMALYAVVVTVCAPIWEEIVFRGFLLPSLTRYMPLPWSILASAAAFALAHFNAQRVMPLVFLGVVMGGVFARSRNLLASMVLHSLWNGFVFLDLMK

SEQ ID NO: 163 - DNA, 1480 bp, Brassica napus
cgaaacggtgccgcttaacatcgaggagacatgcgaaagccctagtacctttatttgagctgaacactccgtctcactcctctccatttcacccccaaatcattcctcctccttaaaccctaaacacatcgcttcgaatcttcgagagctttgtcagagatgagttccgacgatgagagagacgagaaggagctggatctcacctctcctgaagtcgtcacaaagtacaagagcgccgctgagatcgtcaacaaggcgttgcaggttgttttggctgaatgcaagccaggagctaagattgtcgatatctgcgagaaaggagacgcctttatcaaagagcaaacagggagcatgtacaagaatgcaaagaagaagattgacagaggcgtcgcttttcccacgtgcgtttctgtgaacaacgtcgttggtcatttctcacctcttgctggtgatgagtcagtgttggaagagggtgacatggtcaaaattgatatgggatgtcatattgatgggttcattgctcttgttggccacacgcatgttcttcaagaaggacccgttactggacgcaaagctgatgttattgctgctgcgaataccgccgctgaagttgctttgagactcgtacgtcctgggaagaagaaccatgctgtcactgaagctattcagaaggtgtctgaagcgtacgactgcaaaattgtggaaggggttatttcccaccagatgaaacagaacgtgatagatggaagcaagagtttcctaagtgtatccactccagaaacgagggttgatgatgctgagtttgaagagaatgaagtctatgcaatcgatattgtggcaagcactggtgatggcaagcctaagctattagacgagaagcaaacaactatttaccggaaagatgagagtattcactatcagttgaagatgaaggcctccagatccttaataagcgaagttaaagagaacttcccccacatgccattcacttcaaggtcgctggaggagaaaagggcacgtcttggacttgtggagtgtgtgaaccatggtcatttgcaaccatatcctgttctttacgagaagcctggtgattttgttgcccagattaaattcacagttttgctgatgccaaatggatcggataagatcacttcacatacacttcaggagctgcaacctacgaagaccattgatgaccctgagatcaaaggatggttagccttgggtatcaaaaagaagaagggtggtggaaagaagaagaaagccaagaatgcaggagaggcctcaacggaggctgagccaatggaagcaagtagcaatgctgaagcatgagatctttctttttttttttttttctcttaaagaatttttgaaacttcagttcttatgtatgttttgagtttaagagtttcttagataaaaagaacagaaaagaagtacttatcaaaatgtctccttttccaaaaaaaaaaaaaaaaaa

SEQ ID NO: 164 - protein, 390 aa, Brassica napus
MSSDDERDEKELDLTSPEVVTKYKSAAEIVNKALQVVLAECKPGAKIVDICEKGDAFIKEQTGSMYKNAKKKIDRGVAFPTCVSVNNVVGHFSPLAGDESVLEEGDMVKIDMGCHIDGFIALVGHTHVLQEGPVTGRKADVIAAANTAAEVALRLVRPGKKNHAVTEAIQKVSEAYDCKIVEGVISHQMKQNVIDGSKSFLSVSTPETRVDDAEFEENEVYAIDIVASTGDGKPKLLDEKQTTIYRKDESIHYQLKMKASRSLISEVKENFPHMPFTSRSLEEKRARLGLVECVNHGHLQPYPVLYEKPGDFVAQIKFTVLLMPNGSDKITSHTLQELQPTKTIDDPEIKGWLALGIKKKKGGGKKKKAKNAGEASTEAEPMEASSNAEA

SEQ ID NO: 165 - DNA, 1413 bp, Glycine max
tcgtaagcctcttcacttcttcacttcttcttccgcactaatacgaaaccagacggaattcacaaaagacgttaccatgtcggacgatgagagagagaagaaggaattggatctcacttctccggaagttgtcactaagtacaagagcgccgctgagattgttaacaaggccttgcagttagttatttcggaatgtaaaccaaagacaaagattgttgacctttgcgagaaaggggattcgtatattagagagcaaactggtaacatgtacaagaatgtgaagaggaagattgagagaggtgttgccttcccgacatgtgtgtctgtgaacaacactgtctgtcacttctctcctcttgccagtgatgaaacagtgttggaagatggtgatatagtgaaaattgacatggcttgccatatagatgggttcattgctgctgtggcacacactcatgttcttcaggaggggccagttacaggacgggcagccgatgctcttgcagcagcaaacaccgctgccgaagtggccttgcggcttgtaaggcctggaaggaagaacaaggatgtaactgaagcaattcagaagattgccgcagcgtatgattgtaaaattgttgagggtgttcttagccaccaaatgaaacagtttgtgattgatgggaataaggttgtgctaagtgtatccaatccagatacaagggttgatgatgcagagtttgaggagaatgaagtttatgcaattgatatcgtagcaagtactggagatggcaagcctaagcttttggatgaaaagcagacaactatttataagagagctgttgacaagagctatcacttgaagatgaaagcatctaggttcattttcagtgaaataagccaaaagtttcccatcatgcccttctctgcaagggctttggaagagaaaagagctcgtttgggtttagtggaatgtgtgaatcatgagctcctgcaaccttatcctgttctgcatgaaaagcctggtgattatgttgcacatatcaaattcactgtcttgctaatgcccaatggatcagatcgtgttacgtctcactcactccaggagttgcagcccaccaaaacaatagatgatcccgaaatcaaggcgtggctagcattgggcacaaagacaaagaagaaaggcggtggaaagaagaagaaaggtaagaagggggcagaagctgaaccaatggatgcaacaaatgatgctacaccccaagaacaagattgagagacaaaaaccctttgattttgcttttgatccctttcaattttggtacatttttcaccaagttgtatctgcttgattgtgaatttagtacagctttcggacatccaatgttaataggaatttgatttccttggctattgtacttgacctgaatgctgtactcc

SEQ ID NO: 166 - protein, 390 aa, Glycine max
MSDDEREKKELDLTSPEVVTKYKSAAEIVNKALQLVISECKPKTKIVDLCEKGDSYIREQTGNMYKNVKRKIERGVAFPTCVSVNNTVCHFSPLASDETVLEDGDIVKIDMACHIDGFIAAVAHTHVLQEGPVTGRAADALAAANTAAEVALRLVRPGRKNKDVTEAIQKIAAAYDCKIVEGVLSHQMKQFVIDGNKVVLSVSNPDTRVDDAEFEENEVYAIDIVASTGDGKPKLLDEKQTTIYKRAVDKSYHLKMKASRFIFSEISQKFPIMPFSARALEEKRARLGLVECVNHELLQPYPVLHEKPGDYVAHIKFTVLLMPNGSDRVTSHSLQELQPTKTIDDPEIKAWLALGTKTKKKGGGKKKKGKKGAEAEPMDATNDATPQEQD

SEQ ID NO: 167 - DNA, 1517 bp, Glycine max
gtgtggctgtaaccctagttgcacaggagcaccgtttggctctacaagtctttccttttctatttaattcctaaaatcccattcttcttcgctcattcctctgcactgccatcatccccaacttcctcacaaggttacaaggactaaagagttgtgccaccatgtcggacgatgaaagggaggagaaagagttggatctctcttctgccgaagttgtcaccaaatacaaaaccgctgctgagatcgttaacaaggccttgaagctagttatttcagaatgtaaaccaaaggcgaagattgtggatatttgtgagaaaggggattcatacattcgagagcaaactggaaatgtgtacaagaatgtgaagaggaagattgagagaggtgttgctttcccaacatgtttatcaatcaacaacgttgtctgccatttctctccactagccagtgatgaggccgtgttggaagaaggtgatatattgaaaattgatatggcatgccatatagatgggttcattgctgtggtagctcacacccatgttcttcaggaaggtcctgttacaggaagggcagctgatgtcattgctgctgctaatactgctgctgaggtggccttgaggcttgtcaggccgggaaagaagaacaaggatgtaagtgatgcaattcaaaaggttgctgctgcctatgactgtaaaattgttgagggtgttcttagccaccaaatgaagcagtttgttattgatgggaataaagttgtgcttagtttgtctaatccagacacaagggttgacgaagcagagtttgaggagaacgaagtttatgcaattgatatagtaacaagcactggggatggcaagcctaagctgttggatgagaagcagacaactatttataagagggctgttgacaagagttatcacttgaagatgaaagcgtctaggttcattttcagtgaaataagccaaaaatttccaatcatgccattctctgctagggctttggaagagaaaagagctcgacttggtttggtggaatgcgtcaaccatgagctcttgcagccatatcctgttttgcatgaaaagcctggtgatttggttgcgcacatcaaattcacagtcttgttgatgccaaatggatcggatcgaatcacaactcatccactccaagaattgcagcctacaaaaacaatagatgatcctgatattaaggcctggctagccttgggcacaaagacaaagaagaaaggtggtgggaagaagaaaaaaggtaagaaaggggacaaggcagatgagacaactgaagctgaggctatggactcaacaaacggggccactcctcaagagtgacttaactacccttccctctcctctcctctcctctccccaaacaatgaaagaagctttttcgtttcattttcgacacctcttttcaattttggtacattgttcaccaaattgtattttgcttgcttggatgtcaattttagtatagtgttccgacattaaaaaaaaaaaaaa

SEQ ID NO: 168 - protein, 394 aa, Glycine max
MSDDEREEKELDLSSAEVVTKYKTAAEIVNKALKLVISECKPKAKIVDICEKGDSYIREQTGNVYKNVKRKIERGVAFPTCLSINNVVCHFSPLASDEAVLEEGDILKIDMACHIDGFIAVVAHTHVLQEGPVTGRAADVIAAANTAAEVALRLVRPGKKNKDVSDAIQKVAAAYDCKIVEGVLSHQMKQFVIDGNKVVLSLSNPDTRVDEAEFEENEVYAIDIVTSTGDGKPKLLDEKQTTIYKRAVDKSYHLKMKASRFIFSEISQKFPIMPFSARALEEKRARLGLVECVNHELLQPYPVLHEKPGDLVAHIKFTVLLMPNGSDRITTHPLQELQPTKTIDDPDIKAWLALGTKTKKKGGGKKKKGKKGDKADETTEAEAMDSTNGATPQE

SEQ ID NO: 169 - DNA, 1366 bp, Zea mays
aaacctctcacccggcgccgccgccgccaccgccgccgccccgaggccccatcccagcgcaaccgacttccgcctcggattgaagcaatgtcgtcggacgacgaggtcagggaggagaaggagctcgacctctcctccaacgatgtcgtcaccaagtacaagactgccgccgaaatcctgaacaacgctctgaagctggttgtgtctgagtgcaagccaaaagcaaagattgttgacctttgtgagaagggtgactctttcataagagagcaaactgggaatgtctacaagaatgcaaagaggaagattgaaaggggcattgctttcccaacctgtgtttctgtgaacaacacagtctgccacttctccccgcttaccacagatgatgcagttctggaagaaaatgatatggttaaaattgacatggggtgtcatattgatggctttattgctgtggtggcacatacacatgtaattgcaaatgggcctgtcacaggaagagcagctgatgttcttgctgctgccaacacagcagcagaagttgcaatgaggcttgtcagacctgggaagaagaataaggatgttactgaagcaattcagaaagttgctgctgtttatgattgcaaaattgtggaaggtgttcttagccatcaactgaagcaatttgtgattgatggtaacaaagttgtgctaagtgtctccaatgctgatacaaaggttgatgatgctgaatttgaagaaaatgaagtctatgcaatcgatattgtcaccagcactggggaggggaagcccaagttattggatgagaagcagaccaccatctacaaaagggctgtagacaagaattataacctgaagatgaaagcgtcaagatttattttcagtgaaatcagccagaagttcccaatcatgcccttcactgctagggcattagaagagaagcgtgcacgcttaggcttggtggaatgcatgaaccatgagctattgcagccgtaccctgtacttcatgagaagccaggtgaccttgttgcacacataaagttcactgtgctgctaatgcccaatggatcggataggattacatcatatccgctacaggagttaaagccaacaaaatccattgaagacaatgctgagataaaggcatggcttgctttggggacgaaatcaaagaagaagggtggtggaaagaagaagaaaggcaagaaaggagatgcagcaggagatcccatggaggcgacaaacgatgctacaagccaagaataattctgatttttggaattactgcacccagcattttctctcttgtttcttcgctgcatctgatggtgttatattacattcagttgcgaaaaaaaaaaaaaaa

SEQ ID NO: 170 - protein, 392 aa, Zea mays
MSSDDEVREEKELDLSSNDVVTKYKTAAEILNNALKLVVSECKPKAKIVDLCEKGDSFIREQTGNVYKNAKRKIERGIAFPTCVSVNNTVCHFSPLTTDDAVLEENDMVKIDMGCHIDGFIAVVAHTHVIANGPVTGRAADVLAAANTAAEVAMRLVRPGKKNKDVTEAIQKVAAVYDCKIVEGVLSHQLKQFVIDGNKVVLSVSNADTKVDDAEFEENEVYAIDIVTSTGEGKPKLLDEKQTTIYKRAVDKNYNLKMKASRFIFSEISQKFPIMPFTARALEEKRARLGLVECMNHELLQPYPVLHEKPGDLVAHIKFTVLLMPNGSDRITSYPLQELKPTKSIEDNAEIKAWLALGTKSKKKGGGKKKKGKKGDAAGDPMEATNDATSQE

SEQ ID NO: 171 - DNA, 1492 bp, Zea mays
tcgatttctaattctcctcgcgagcccaaaccctaaacctaaacctttcacccgccgccgccgccaccaccagcactgccactccgccaccaccgtcccgaagccccctcccagcgccatcgacttcatctcggattgaagcaatgtcgtcggacgatgaggtcagggaggagaaggagctcgacctctcctccaacgacgttgtcaccaagtacaaggctgccgccgaaatcctcaacaacgctctgaagattgttgtgtctcagtgcaagccaaaagtcaagattgttgacctttgcgagaagggcgactctttcataagagagcaaactgggaatgtttacaagaacgcaaagaggaagattgaaaggggtattgctttcccaacctgtgtatccgtcaatgacacagtttgccacttctcaccgcttgcaaccgatgatgccgttctggaagaaaatgacatggttaaaattgatatgggctgtcatattgatggctttattgctgtggtggcacatacacatgtaattacaaatgggcctgtcacaggaagggctggtgatgtgcttgctgctgccaacacagcagcagaagtcgcaatgcggcttgtgagacctgggaagaaaaataaggatgttactgaagcaattcagaaagttgctgctgcttatgattgcaaaattgtggaaggtgttcttagccatcaactgaaacaatttgtgattgatggtaacaaagttgtgctcagtgtctccaatgctgatacaaaggttgatgatgctgaatttgaagaaaatgaagtatatgcaatcgatattgtcaccagcactggggaggggaagcccaagttattggatgagaaacagaccaccatctacaaaagggccgtagacaagaattatcacttgaagatgaaagcgtcaaggtttattttcagtgagatcagccagaagttcccaatcatgccttttactgctagggcattagaagagaagcgtgcgcgtttaggcttggtggaatgcatgaaccatgaactattgcagccgtaccctgtacttcatgagaagccaggcgatcttgttgcacacataaagttcactgtgctgctgatgcccaatggatcagataagataacatcacatcctctacaggagttaaagcccaccaaatccattgaagacaatgcagagataaaggcatggcttgctttggggacgaaatcaaagaagaagggtggtgggaagaagaagaaaggcaagaaaggagatgcagcagaagcagatcccatggaggaggcgacaaacggtgctacaagccaagaataattctgatttttggaattactgccaccagcttttttcttgtttcttcgctgcatctgatggtgttatattacattcagttgtggaaaaattgagtactatttctagcttctaagaaatgaagcatcctattatcgcaaaaaaaaaaacaaagataatcgacaagg

SEQ ID NO: 172 - protein, 394 aa, Zea mays
MSSDDEVREEKELDLSSNDVVTKYKAAAEILNNALKIVVSQCKPKVKIVDLCEKGDSFIREQTGNVYKNAKRKIERGIAFPTCVSVNDTVCHFSPLATDDAVLEENDMVKIDMGCHIDGFIAVVAHTHVITNGPVTGRAGDVLAAANTAAEVAMRLVRPGKKNKDVTEAIQKVAAAYDCKIVEGVLSHQLKQFVIDGNKVVLSVSNADTKVDDAEFEENEVYAIDIVTSTGEGKPKLLDEKQTTIYKRAVDKNYHLKMKASRFIFSEISQKFPIMPFTARALEEKRARLGLVECMNHELLQPYPVLHEKPGDLVAHIKFTVLLMPNGSDKITSHPLQELKPTKSIEDNAEIKAWLALGTKSKKKGGGKKKKGKKGDAAEADPMEEATNGATSQE

SEQ ID NO: 173 - DNA, 1053 bp, Brassica napus
atggcacgtccacaagaccctccacgcggtttcttcccttttggaaaccctttcaagaacctatcttccaagaacccagtactatcctctaaccttctctccctcttgaacactttcgagaccaacttagcttcttccattacaaagcttgtccccaaggaaaagtcccagatcctcaccctttcatggatgagtcaagcgatggcatctctttgccagacccacaacgctatcaagactcttataaccgatctagagcttcctgtctcagattgggaggacaagtgggtcgacatctacctagacatcagcgtcaagctcctcgacctctgcaacgccttcagctcggagctaagccgcctcaaccaaggccatctcttcctccagtttgctctgcataacttggggaccaacgctcctcagaatctgccgaaagctcaatcctccctcgacgcctggaagcagcacatcgtttccaagaacccgaggttggagagctgtcacgcgatcctgaccagccttgttcagaccttgaatctccccaaggtgaagaactctgccaaaggcaaagtcctgatgcgagctttgtacggtgtaaaggtcaagactctgtacatctctggtgtcttcgctgctgccttctcaggctcatcgcagaaccttctgtacgttacggtctcaaacgagcttccgtgggcaccttccttcatggatatgcagaacacgatgaactcagagatgaagagcatattcttatcagacggtttaaccgttatgaaagagctcgaggctgttgattcaggtgttaagaaccttgcccctgcgatccaacaagggtctatagattccatttcgctgcagccgttgaaggactcggtcacggagttgacgagtgggatagaccttgtttccaaggaggtggattgcttcttcaagattctgttatcggggagggacactttgctggagaacctcaggtcgatgggagcaccaacaacggtgctgacgacgtcaccaaaaaaggctgccggaaaaaagcagagaggattctga

SEQ ID NO: 174 - protein, 350 aa, Brassica napus
MARPQDPPRGFFPFGNPFKNLSSKNPVLSSNLLSLLNTFETNLASSITKLVPKEKSQILTLSWMSQAMASLCQTHNAIKTLITDLELPVSDWEDKWVDIYLDISVKLLDLCNAFSSELSRLNQGHLFLQFALHNLGTNAPQNLPKAQSSLDAWKQHIVSKNPRLESCHAILTSLVQTLNLPKVKNSAKGKVLMRALYGVKVKTLYISGVFAAAFSGSSQNLLYVTVSNELPWAPSFMDMQNTMNSEMKSIFLSDGLTVMKELEAVDSGVKNLAPAIQQGSIDSISLQPLKDSVTELTSGIDLVSKEVDCFFKILLSGRDTLLENLRSMGAPTTVLTTSPKKAAGKKQRGF

SEQ ID NO: 175 - DNA, 1173 bp, Brassica napus
atggcggatgtggaggagcttcagcacgagaaccagagcccggagaaaaagccgagatacaaaggtaaacacgacaagccgaagccgtgggacgacgacccgaacatcgaccgttggaaagtcgagaagttcgatccggcgtggaatccgacgggcatgctcgaagtcagctcattctccacgctcttccctcagtacagagagaagtatcttcaggactcttggcccacgatcgaatccgctctcaaacaatacggcgtcgcttgcaaactcaacctggttgaaggatctatgactgtttcgacgacgaggaagacgagagatccgtatatcattgtcaaagctagggatttgattaagcttctttcgagaagtgttcctgctcctcaggcaatcaagattctggaagatgaagtgcaatgtgatatcatcaagattggaagcttggttcggaataaggaaaggtttgtgaaaagaaggcagcggcttgtgggtcctaattcttctaccttgaaggcgatggagatattaaccgactgttacattctagttcagggaagtactgtagctgcaatgggttcttttaaaggtctaaaacaagtccgaagggttgtggaacagtgtatgcgtaatgaattacatcctgtataccagataaaggatctcatgatgagaagggaactagcaaaggatccagcgcttgcaacggaaagctgggataggtttcttcctaagttcaggaagagtaatgttcagcaaaagaagcccaagagcaaggagaagaaggaatacacaccattccctcctcctcaaccgcctagcaaggttgataagcaattggagtctggagaatacttcctgaatgaaaacaagaagtcagagaagaagtggcaggagaagcaagagaagcagacagagaagactatagagaagaaaagaatgagagatgcctcgttcgtcccacctgaggaacctgtgcagagcagcaacaactcaaacaaatacgaggaggggaagaaagatctaaccgagttaacacaatccttaaagagcaagacaaaagagttgaagaagcagaagaagactcaagagaaagtgaatgcagaggagtacattgccgttatgtctggtgataaatcttccaagaagaaatccaaagtcgtgagagattaa

SEQ ID NO: 176 - protein, 390 aa, Brassica napus
MADVEELQHENQSPEKKPRYKGKHDKPKPWDDDPNIDRWKVEKFDPAWNPTGMLEVSSFSTLFPQYREKYLQDSWPTIESALKQYGVACKLNLVEGSMTVSTTRKTRDPYIIVKARDLIKLLSRSVPAPQAIKILEDEVQCDIIKIGSLVRNKERFVKRRQRLVGPNSSTLKAMEILTDCYILVQGSTVAAMGSFKGLKQVRRVVEQCMRNELHPVYQIKDLMMRRELAKDPALATESWDRFLPKFRKSNVQQKKPKSKEKKEYTPFPPPQPPSKVDKQLESGEYFLNENKKSEKKWQEKQEKQTEKTIEKKRMRDASFVPPEEPVQSSNNSNKYEEGKKDLTELTQSLKSKTKELKKQKKTQEKVNAEEYIAVMSGDKSSKKKSKVVRD

SEQ ID NO: 177 - DNA, 1455 bp, Glycine max
  misc_feature (1449)..(1449): n is a, c, g, or t
cctaacagaagaaagtgcaccggaaagaaagcagaaagcagaaagcagcgatggaaatccactcagaggaggagaatggcgtagcgaacgagtcacaagcacttgagcagaaggagaagcgaaaggggaagcacgacaagcccaagccatgggacgacgacccaaacatcgaccactggaagatcgagaagttcgacccttcatggaacgacggcggcatgctcgaagtgagctccttctccactctctttcctcagtaccgcgaaaagtacctccaagaagcttggcccatggtcaaatcctcactcaaggagttcggtgttgcttgcgaactcaacctcgttgagggttccatgactgtttcaaccaccaggaagactagggacccctatattatcatcaaagccagggatcttatcaagcttctatcacgaagtattcctgctcctcaggcgataaaaatacttgacgatgagatgcaatgtgacatcattaaaatcagtggcatggttcgcaataaggagcgatttgtaaaaagaagacaacatcttgtgggccccaattcttccaccttgaaggctcttgaaatactcactggctgctacattctcgtccagggaaacacagttgctgctatgggttcattcaaaggcttgaagcaagtcagaagaattgttgaagaatgcatgctgaataaaatgcatcctgtatacaacattaaggttcttatgatgaagaaagaacttgaaaaggatccagcacttgcccaggagaactgggataggttccttccaaaattcaagaagaaaaatgttaagcaaaagaaggttaacactaaacagaagaaaccatacactcctttccctccacctcaacagcccagtaagattgatatacaattagaaactggagaatactttttaagtaacaaaaggaaatcagcaaagatatggcaagagaagcaagagaagcaggctgagaaaactgctgaaaacaaaaggaaaagagaagaggcctttatcccacccaaggagcctgcaaatctggtggataaatctgaggatgctaacaataatgtagctgacatggcaatttccttaaagaaaaaaacaaagaagtttgggaagcgtaaatctgaagaaaatataaatgccgagacatatattataggatcatcagaacaagcatcgggaaagaaatccaagaagcaaaggtcttaaacataatcttcattttggagatgaaaaatgagcatgtgatgtctatgttaattcaatcaagatcttctgcatccaatgtctttgcagtaacagttttgacaccaatgtattttgaggcatagttgttcattccatttgtcatggagatgagtgcgtggcattgtgtatcttattgtacttgccaatagacagtaagtcagtatcatgtacactacctgttatttaagtntacatc

SEQ ID NO: 178 - protein, 389 aa, Glycine max
MEIHSEEENGVANESQALEQKEKRKGKHDKPKPWDDDPNIDHWKIEKFDPSWNDGGMLEVSSFSTLFPQYREKYLQEAWPMVKSSLKEFGVACELNLVEGSMTVSTTRKTRDPYIIIKARDLIKLLSRSIPAPQAIKILDDEMQCDIIKISGMVRNKERFVKRRQHLVGPNSSTLKALEILTGCYILVQGNTVAAMGSFKGLKQVRRIVEECMLNKMHPVYNIKVLMMKKELEKDPALAQENWDRFLPKFKKKNVKQKKVNTKQKKPYTPFPPPQQPSKIDIQLETGEYFLSNKRKSAKIWQEKQEKQAEKTAENKRKREEAFIPPKEPANLVDKSEDANNNVADMAISLKKKTKKFGKRKSEENINAETYIIGSSEQASGKKSKKQRS

SEQ ID NO: 179 - DNA, 1466 bp, Zea mays
gccggcggcagccttaaccctaatctcatcgcctcctcttccttctccagttcctcgaaggcccagcagacaacagcccctctttcttctcagccatgtcggaggacgaagcgaacgctgctgctgcgccggcagagggaaagaactggcggcggaaggggaagcacgacaagcccaagccgtgggacgaggaccccaacatcgaccgctggaagatcgacaagttcgaccctgcctggaacgagggcggcatgctcgaagtcagctccttctccaccctctttccccagtaccgagagaagtacctacaggaggcgtggccggtcgtgaagggcgcattgaaggagtacgggatctcgtgcgagctcaatttggtggagggatccatgactgtgtcgacgaccagaaagacaagggatcccttcgctattatcaaggccagggaactaattaagcttttgtccaggagcgtccctgcacctcaggcaatcaaaattcttgatgatgagatgaactgcgatattattaagattggtggtcttgtgagaaataaggagcggtttgttaaaaggagggaacggcttttaggccctaacttgtctacactcaaggctattgagattttgactggctgctacatcttagtgcagggaaatactgttgcagccatgggcaactataggggaaggggactgaaacaagtgagaaggattgtagaggattgcatgaagaatgtaaagcatccagtgtaccacatcaaggaactactaatcaaacgtgagctagcaaaaaatcctgctctagccaatgaaaattgggacagatttctcccgaagttcaagaagaagaatgtcaagcagaagaagcctcaaactaaggagaagaaaccgtacacaccctttccaccgcctcaacagcctagcaagattgatcttgaacttgagaacggtgagtatttcatgagtgacaaaaagaaatcagcaaagaaatggcaagagaagctggacaagcaatctgggagagctgaagaaaataaaagaaaaagagaggctgcatttgttcctccaaaggagaacactgcaggtccatccaaatctgacaagaatgccagtgacaacagtgagatagccgatatagcgaagtcattaaagagaaaggcgaaggaatttagaaagaacgaggcccaggagagtgtcatagctgaatcatatatcgcaagtaatgatgaattgcggcaaaaaaagaaaaagaaatcaactaagtccaagtagcctaatcctcatgcataatgacactggcaattgagaaggattgcatgagccatccctataattatgtcattcatgctgtgatcgtattagatgatgaaacaaaattcgaaccttccgctggtctgttgttgcaacagttcatatgcaataggtttttaatgggtaactgccatgataaccaagcaaaaaaaaaaa

SEQ ID NO: 180 - protein, 391 aa, Zea mays
MSEDEANAAAAPAEGKNWRRKGKHDKPKPWDEDPNIDRWKIDKFDPAWNEGGMLEVSSFSTLFPQYREKYLQEAWPVVKGALKEYGISCELNLVEGSMTVSTTRKTRDPFAIIKARELIKLLSRSVPAPQAIKILDDEMNCDIIKIGGLVRNKERFVKRRERLLGPNLSTLKAIEILTGCYILVQGNTVAAMGNYRGRGLKQVRRIVEDCMKNVKHPVYHIKELLIKRELAKNPALANENWDRFLPKFKKKNVKQKKPQTKEKKPYTPFPPPQQPSKIDLELENGEYFMSDKKKSAKKWQEKLDKQSGRAEENKRKREAAFVPPKENTAGPSKSDKNASDNSEIADIAKSLKRKAKEFRKNEAQESVIAESYIASNDELRQKKKKKSTKSK

SEQ ID NO: 181 - DNA, 1127 bp, Glycine max
cgttctgctccgagcgatcaagtgagtgagtgagtgagtgtcatatatatatacatagtgcgttcgagaaatgcagcagcacctgatgcagatgcagcccatgatggctgcctactaccccaacaacgtcaccactgatcacattcaacagtacctggatgagaacaagtccttgattctgaagattgttgaaagccagaattctggcaagctgagcgagtgtgccgagaaccaatcaaggctgcagagaaatctcatgtacctagctgcaatagctgattctcaaccacaaccatctccattggctggtcagtatccttctagtggacttgtgcagcagggagcacactacatgcaggctcaacaggctcagcagatgtcacaacaacagctaatggcttcgcgctcctcgctcctgtactcccaacagcctttctcagtgcttcaacagcagcaaggcatgcacagccaacttggcatgagctccagtggaagtcaaggcctccacatgctgcaaagtgaagccactaatgttggaggcaatgcaaccataggaaccggaggagggtttccggactttgtacgcattggtagtggcaagcaagatattggaatctctggtgaaggcagaggaggaaactctagtggccactctggtgatggtggtgagacacttaattacctgaaagctgctggtgatggaaactgaactagccagggagaatggtaaaagtttccttggcctttagccgtttattgagtgaattatgagaattaggcaatggagattaagtagggaagggaaggaggaaagggaaaagttgctgcttagatatcttgtttgttaatcttgtgctaaaggcaaactgccttaacgtttctgtagtactagtaactagtaagtaacatgatgcatgctttatttttcttgtgtaaagttctagtcataaatgtcagggtcacaagttccttccctttctgttctgtttctgtatgcacacttgttggccaagagggttatttggtgaacgatgacagatgtaattttgacgatgttcctgctttaaggagtttgatgcatcaaagttcaattacaagctaaacccattacgaaaaaaaaaaaaaaa

SEQ ID NO: 182 - protein, 212 aa, Glycine max
MQQHLMQMQPMMAAYYPNNVTTDHIQQYLDENKSLILKIVESQNSGKLSECAENQSRLQRNLMYLAAIADSQPQPSPLAGQYPSSGLVQQGAHYMQAQQAQQMSQQQLMASRSSLLYSQQPFSVLQQQQGMHSQLGMSSSGSQGLHMLQSEATNVGGNATIGTGGGFPDFVRIGSGKQDIGISGEGRGGNSSGHSGDGGETLNYLKAAGDGN

SEQ ID NO: 183 - DNA, 912 bp, Brassica napus
agagatgcaacagcacctgatgcagatgcagcccatgatggctggttactaccccagcaatgtcacctctgatcatatccagcagtacttggatgagaacaagtctttgattctgaagatagttgagtctcaaaactcaggaaagctcagcgagtgtgccgagaatcaggcaaggcttcaacgcaacctcatgtacttggctgcaatagcagattctcagcctcaacctccaagcgtgcatagccagtatggatctgctggtggtgggttgattcagggagaaggagcgtcacactatttgcagcagcaacaggcgactcaacagcagcagatgactcagcagtctcttatggcagctcgttcttcaatgatgtatcagcagcagcaacagccttatgcaacgcttcagcatcagcagttgcaccatagccagcttgggatgagctctagcagcggaggaggaagcagtggtctccatatccttcagggagaggctggtgggtttcatgaatttggccgtgggaagccggagatgggaagtggtgaaggcaggggtggaagctcaggggatggtggagaaacactctacttgaagtcatcagatgatgggaactgaaagagtgttgcacaagtaaggtccagtgaagaagcagcagcagaagtagtagtagtaagagtctgaagtttgtttgttttggtttagttgcttgttgaagaagcaaagaacttgtttattttatttctatgtttgttccctaaaaatatgaactcttacgtggtgaagtgtaccatgcatatctgctcgctacaagttatgtcgtaatcttagtatgttatttcttaggacaataatttctggagatcattgtttgtgaaatgtgacgtagtttgaatttcaaaaaaaaaaaaaaa

SEQ ID NO: 184 - protein, 203 aa, Brassica napus
MQQHLMQMQPMMAGYYPSNVTSDHIQQYLDENKSLILKIVESQNSGKLSECAENQARLQRNLMYLAAIADSQPQPPSVHSQYGSAGGGLIQGEGASHYLQQQQATQQQQMTQQSLMAARSSMMYQQQQQPYATLQHQQLHHSQLGMSSSSGGGSSGLHILQGEAGGFHEFGRGKPEMGSGEGRGGSSGDGGETLYLKSSDDGN

SEQ ID NO: 185 - DNA, 1245 bp, Glycine max
gggaccagagagaaaacagggggatttgtttctctctgcagttgcactcttgcaggcaggtgcagctgtttcccgttctgctcctctcccaacccctctgtttctttggagtgagaaagttttatactttagaaccagctagcgagcaagtgagcgagtgtcatatatatatatacatagtgcgttcgagaaatgcagcagcacctgatgcagatgcagcccatgatggctgcctactaccccaacaacgtcaccactgatcacattcaacagtacctggatgagaacaagtccttgattctgaagattgttgaaagccagaattctggcaagctgagcgagtgtgccgagaaccaatcaaggctgcagagaaatctcatgtacctagctgcaatagctgattctcaaccacaaccatctccattggctggtcagtatccttctagtggacttgtgcagcagggagcacactacatgcaggctcaacaggctcagcagatgtcacaacaacagctaatggcttcgcgctcctcgctcctgtactcccaacagcctttctcagtgcttcaacagcagcaaggcatgcacagccaacttggcatgagctccagtggaagtcaaggcctccacatgctgcaaagtgaagccactaatgttggaggcaatgcaaccataggaaccggaggagggtttccggactttgtacgcattggtagtggcaagcaagatattggaatctctggtgaaggcagaggaggaaactctagtggccactctggtgatggtggtgagacacttaattacctgaaagctgctggtgatggaaactgaactagccagggagaatggtaaaagtttccttggcctttagccgtttattgagtgaattatgagaattaggcaatggagattaagtagggaagggaaggaggaaagggaaaagttgctgcttagatatcttgtttgttaatcttgtgctaaaggcaaactgccttaacgtttctgtagtactagtaactagtaagtaacatgatgcatgctttatttttcttgtgtaaagttctagtcataaatgtcagggtcacaagttccttccctttctgttctgtttctgtatgcacacttgttggccaagagggttatttggtgaacgatgacagatgtaattttgacgatgttcctgctttaaggagtttgatgcatcaaagttcaattacaagctaaacccattatgaaataaaaaaa

SEQ ID NO: 186 - protein, 212 aa, Glycine max; identical to SEQ ID NO: 182

SEQ ID NO: 187 - DNA, 1342 bp, Glycine max
gatcctctagagcggccgctgcgtgtcggtctctctctctctctttgctttgtcttcaaattccagaaacatcgtgtgcacagtaccccagaagatcgaacaaggatctccacgaagacaaacctctgttctcaactgtgtttctttacctctcacctactttcagaccatacccagattgactaggctgagaagatgcagcagacaccgcctatgattcctatgatgccttcgttcccacctacgaacataaccaccgagcagattcaaaaataccttgatgagaacaagaagctgattctggcaatattggacaatcaaaatcttggaaaacttgcagaatgtgcccagtaccaagctcagcttcaaaagaatttgatgtatttagctgcaattgctgatgcccagcctcaaaccccggccatgcctccgcagatggcaccgcaccctgccatgcaaccaggattctatatgcaacatcctcaggctgctgcagcagcaatggctcagcagcagcaaggaatgttcccccagaaaatgccattgcaatttggcaatccacatcaaatgcaggaacaacaacagcagctacaccagcaggccatccaaggtcaaatgggacttagacctggagatataaataatggcatgcatccaatgcacagtgaggctgctcttggaggtggaaacagcggtggtccaccttcggctactggtccaaacgatgcacgtggtggaagcaagcaagatgcctctgaggctggaacagctggtggagacggccaaggcagctccgcggctgctcataacagtggagatggtgaagaggcaaagtgacatgtttttatgtgcttttcatgagatacatatgactgttgatagtaggttttcttaaaagggtaggactagtgtgatctgatgacctttgataggtcgaccaaaggacaaaagggcttctcttgtttgatagcttaggtagttgtgttgttagaattttggcacgaagcaagtttgcatcaactgaaacggctggtgccacaacatactgtacttgtcactggaaggtgtaagcatgtggtatttgtgatcacctaaattgcttctggtttttaacaatttttctttgcagtttgttgtggtcatataaacaaaaatgtttgcttttggtgcaattctactggattctaggcgtcaattgaaacatgaaatgccgtggatggattcacggtctgaatttagtttagggtctaatcttcattaggcccggaacttgcaattcaggaacaagtactttgagatgcttctaaaggatatttgcctttattacagttattattttgaa

SEQ ID NO: 188 - protein, 213 aa, Glycine max
MQQTPPMIPMMPSFPPTNITTEQIQKYLDENKKLILAILDNQNLGKLAECAQYQAQLQKNLMYLAAIADAQPQTPAMPPQMAPHPAMQPGFYMQHPQAAAAAMAQQQQGMFPQKMPLQFGNPHQMQEQQQQLHQQAIQGQMGLRPGDINNGMHPMHSEAALGGGNSGGPPSATGPNDARGGSKQDASEAGTAGGDGQGSSAAAHNSGDGEEAK

SEQ ID NO: 189 - DNA, 1451 bp, Helianthus annuus
gagagaccgacacgaatctctaatggcgggaacgtcggtggtaccggcgaacagagggcggaggaacacgatggtggacgacgagaagctggtgtttgaaacatcgaaaggagtggagccaatcatgaccttcgatcagatgggaattaaggacgatctcctccgtggaatctaccaacacggcttcgagaaaccttccgcaattcaacagagagctgtacgcccaattattgaaggccgtgacgtcattgctcaggctcagtctggtaccggaaaaacctcaatgattgcccttactgtttgccagattgttgacacctcttccagagaggtccaagcgttgattttgtcacctacaagagagcttgcagctcaaacagagaaacaaatactggctattggtgatttcatcagcatacaagcccatgcatgcattggtggaaaaagtgtcggtgaggacatcagaaagttagaaaatggagttcatgtcgtttctggaacccctggtagagtctgtgacatgatcaagagaagaacattgagaactagagccattaaattgctaattcttgatgaatctgatgaaatgttgagccgagggtttaaggatcaaatttatgatgtttaccgataccttccaccagagcttcaggtttgtttggtgtctgctacacttcctaatgaaatattggagatgactagcaaattcatgaccgatcctgttagaattcttgttaagcgtgatgaattgactcttgagggaataaagcagttctttgttgctgttgaaagagaaaattggaagtttgatactctctgtgatctgtacgatactcttacaattacccaggctgtaatcttctgtaacacaaagcgaaaggtggattggttaactgagaagatgcgtgagaacaactttactgtatcggcaatgcatggagacatgcctcaaaaggagcgagatgcgataatggaagaatttcgatctggtgttactcgtgtcttgattaccacagatgtgtgggccaggggattggatgttcaacaggtttctctggtgattaattatgacctcccaaataacagagagctttacattcaccgtattggtcgatctggtcgttttggacgaaagggtgttgctataaatttcgtgaaaactgacgatatcaagattctaagagacatagagcagtattacagtacccagatagatgaaatgcccatgaatgtggctgacttgatataagtttcgagaaccgaatgtggaagagctttaattttccaagtatgagtggttctgtgatgttgcagtattttaacttttgattgtagttgtggaggataatctaaaattaattgttgtcgtactgtaggctacaaatattttgaatttatttttgtgaatatagaaatatttcatccagattgacaggaaaaaaaaaaaaaaa

SEQ ID NO: 190 - protein, 408 aa, Helianthus annuus
MAGTSVVPANRGRRNTMVDDEKLVFETSKGVEPIMTFDQMGIKDDLLRGIYQHGFEKPSAIQQRAVRPIIEGRDVIAQAQSGTGKTSMIALTVCQIVDTSSREVQALILSPTRELAAQTEKQILAIGDFISIQAHACIGGKSVGEDIRKLENGVHVVSGTPGRVCDMIKRRTLRTRAIKLLILDESDEMLSRGFKDQIYDVYRYLPPELQVCLVSATLPNEILEMTSKFMTDPVRILVKRDELTLEGIKQFFVAVERENWKFDTLCDLYDTLTITQAVIFCNTKRKVDWLTEKMRENNFTVSAMHGDMPQKERDAIMEEFRSGVTRVLITTDVWARGLDVQQVSLVINYDLPNNRELYIHRIGRSGRFGRKGVAINFVKTDDIKILRDIEQYYSTQIDEMPMNVADLI

SEQ ID NO: 191 - DNA, 1521 bp, Glycine max
tgcagatccgaggagttaccccttagctttttctctttccttattctatttcaaacttccaccagtgatggcaggtttggctccagaaggaacacaatttgatggtcgccaatatgatgctaagatgagtgaattgctttccactgatgggcaagaattcttcacctcatatgacgaagtctatgacagctttgatgccatgggattgcaagagaatcttctgcgaggcatatatgcttatggttttgagaggccttctgcaatccagcaaaggggaattgttcctttctgcaaaggtctggatgtgattcaacaggctcagtctggaacaggaaagacagcaacattttgttctggaattttgcagcagcttgattatggattggttcagtgccaggctttggttttggcaccaacaagggagctagcacagcagattgagaaagttatgcgagctcttggtgattacctgggagttaaggttcatgcttgtgttggtgggacaagtgttcgtgaggatcagcgcattctccaagctggtgtccatactgttgttggcactcctgggcgtgtgtttgacatgctgcggaggcagtctcttcgcccagattgcataaagatgtttgttttggatgaggctgatgaaatgctttcacgtggttttaaggatcagatctatgacatctttcagctgctgccatccaaaattcaggttggagtgttctctgctacaatgccaccagaagcccttgagattacaagaaagttcatgaataagccagtgagaatcctggtaaagcgtgatgaactgaccctggagggtatcaagcagttttatgtcaatgttgacaaggaagagtggaagctggagacattatgcgacctttatgagactctggctatcacccagagtgtcatttttgtgaataccaggcgcaaggtggactggctcactgacaagatgcgaagcaatgatcacacagtctctgccacccacggtgacatggaccaaaatacccgtgatatcatcatgcgtgaattccggtccggctcttcccgagttctcattaccactgaccttcttgcccgtggaattgatgtacagcaggtgtctctggtcataaattatgatctgccaacccaacctgaaaactatctccaccgcatagggcgtagtggtcggtttggaagaaaaggagtttctataaactttgtcacgacggatgatgccagaatgctgtctgatattcagaagttctacaatgtgactgtagaggagctgccatcaaatgttgctgatttactctgatgagttaatttttgttctctgttaagtcatcaggatcttattctatttggcaagtattatttgttcttattttttctctatatattttacctattagagatcaaagacatgtgatctgatgctatttgtattggattctataaattttgtttaatcaattaattagcaggttgctgctcaagcctgcatttgctttcaaaaaaaaaaaaaaa

SEQ ID NO: 192 - protein, 413 aa, Glycine max
MAGLAPEGTQFDGRQYDAKMSELLSTDGQEFFTSYDEVYDSFDAMGLQENLLRGIYAYGFERPSAIQQRGIVPFCKGLDVIQQAQSGTGKTATFCSGILQQLDYGLVQCQALVLAPTRELAQQIEKVMRALGDYLGVKVHACVGGTSVREDQRILQAGVHTVVGTPGRVFDMLRRQSLRPDCIKMFVLDEADEMLSRGFKDQIYDIFQLLPSKIQVGVFSATMPPEALEITRKFMNKPVRILVKRDELTLEGIKQFYVNVDKEEWKLETLCDLYETLAITQSVIFVNTRRKVDWLTDKMRSNDHTVSATHGDMDQNTRDIIMREFRSGSSRVLITTDLLARGIDVQQVSLVINYDLPTQPENYLHRIGRSGRFGRKGVSINFVTTDDARMLSDIQKFYNVTVEELPSNVADLL

SEQ ID NO: 193 - DNA, 1635 bp, Glycine max
agcactgtaacctcacacctctccaaaatccgttccccctttctttcaaacccttttttttttcttccaacaaatcagcgatggcgacgacgtcggtggtgccggcgaatcggcggcgtgcggcggcgaaccccgccgaggatatggacttcgagacgacggagggcgtgaaggccatcgcgagcttcgaggagatggggatcaaggacgatctgctccgcggaatctaccagtacggcttcgagaagccctcagccattcagcagcgggccgtgactccgatcattcagggccgtgacgtcatcgcccaggcccaatccggaacgggcaaaacctccatgattgctctcaccgtttgccaggtcgtcgatacctccgtcagagaggttcaggctttaatattgtcaccaacgagggaactggcctcacagactgagaaagttatattggctattggggatttcattaatatacaagctcatgcatgcgttggtggtaaaagtgtgggagaagatataaggaaacttgagtatggagttcatgtggtgtctggaactcctggccgagtttgtgacatgatcaaaaggagaacattgcgcacgagagctatcaagatgctagttcttgatgaatctgatgaaatgttgagcagagggtttaaagatcaaatttatgatgtgtatagatatctcccacccgaccttcaggtttgcttgatttctgctacccttcctcatgaaatactggagatgacaaacaaattcatgacagatccagtaaggatccttgtaaaacgtgatgaattgacattggagggcatcaaacaattttttgttgcggtcgaaagggaggaatggaagtttgataccctgtgtgatctttatgataccctcactatcactcaagctgttatattctgtaacactaagcgaaaggtggactggttaactgaaaaaatgcgtaacaacaatttcactgtctcatcaatgcacggtgacatgcctcagaaagaaagagatgctattatgggagaatttcgtgctggaacaacccgtgtactaataacaactgatgtttgggcccgtggtcttgatgtacagcaggtttctctagttatcaattatgaccttcccaataatcgtgagctttacattcatcgaattggccgttctggacgttttggaagaaagggtgttgcgataaattttgtgaagagcgatgacatcaagatcttgagagacattgaacaatactacagtactcagattgatgaaatgccaatgaatgttgctgatcttatataatttgtcacgtggtgtgctggatggagtggatttgtcatatcttgtggtagggagtagtgtttgaatgtggtttcttgctatggaatacattcgtgatgctcttgtacacttttgacttttggtcaaattagaatttttaccttagtgttgactgtaccagaggtagtgtttttctttgctgatgaggttgagaattgagattaatgtgtaaattgtgttgagttgttttatctattgtatcactcttgatattgaatttgtaattttatgcttcaaatggcaggtgatatcttgacttggtttttgataattttatgagcacatacaattt

SEQ ID NO: 194 - protein, 407 aa, Glycine max
MATTSVVPANRRRAAANPAEDMDFETTEGVKAIASFEEMGIKDDLLRGIYQYGFEKPSAIQQRAVTPIIQGRDVIAQAQSGTGKTSMIALTVCQVVDTSVREVQALILSPTRELASQTEKVILAIGDFINIQAHACVGGKSVGEDIRKLEYGVHVVSGTPGRVCDMIKRRTLRTRAIKMLVLDESDEMLSRGFKDQIYDVYRYLPPDLQVCLISATLPHEILEMTNKFMTDPVRILVKRDELTLEGIKQFFVAVEREEWKFDTLCDLYDTLTITQAVIFCNTKRKVDWLTEKMRNNNFTVSSMHGDMPQKERDAIMGEFRAGTTRVLITTDVWARGLDVQQVSLVINYDLPNNRELYIHRIGRSGRFGRKGVAINFVKSDDIKILRDIEQYYSTQIDEMPMNVADLI

SEQ ID NO: 195 - DNA, 1569 bp, Glycine max
gtcctacgatacgattctcttccgcctcccttcccttcaactccacggcgcagatccgaggagtttgggaaaccctaattcattcctctttgcttcttctatctctattcctctaacaccagtgatggcaggtttggctccagaaggatcgcagtttgatgctcggcaatatgattctaagatgaatgaattgctttccgccgatggacaagaatttttcacttcatatgacgaagtctatgatagttttgatgcaatgggccttcaagaaaatcttctgagaggcatatatgcttatggttttgagaggccttctgcaatccagcagaggggaattgttcctttctgcaagggtctggatgtgattcagcaggctcagtctggaactggaaagacagcaacgttctgttcaggaattttgcagcagcttgactatggattggttcagtgtcaggctttggttttggcaccaacaagggagcttgcacagcagattgagaaggttatgcgagctctaggtgattaccttggtgtcaaggttcatgcttgtgttggtgggaccagtgttcgtgaggatcagcgcattctccaagctggtgtccatactgttgttggcactcctgggcgtgtatttgacatgctacggagacagtctcttcgtccagatcacataaagatgtttgttttggatgaggctgatgaaatgctttctcgtggtttcaaggaccagatctatgacatcttccagcttctgccgggtcaaattcaggttggagtgttctctgctacaatgccacctgaggccttggagattacgaggaagttcatgaataagccagtgagaatcctggtaaagcgtgatgaattgacccttgagggtatcaaacagttttatgtgaatgttgataaggaagactggaaactagagacattatgtgacctttatgagactttggctatcacccagagtgtcatctttgtgaacacaaggcgtaaggtggactggctcactgacaagatgcgaagcaatgaccatacagtctcagccacccatggagacatggaccaaaacactcgtgacatcatcatgcgggaatttcgctctggctcttctcgagttctaattaccactgacctcttggctcgtggtatagatgtacagcaggtgtctttggttataaactatgatctgccaacccaacctgaaaattatcttcatcgcataggacgaagtgggcgttttggaagaaaaggtgttgccataaactttgtgactttggatgatgcaagaatgctgtctgatattcaaaagttctacaatgtgactgtagaggagttgccatcaaatgttgctgatctgctctgatgggttaattttcattctttgttaagtcatcagagggctattactttttgccaattattattttgtgctctttgtttttctttttcaaattttagcattagagttccaatacacctgactttatttttataatggattctataaaatttgtttatttgcaaaaaaaaagagagagagaccgacacgcagcggccgctctagag

SEQ ID NO: 196 - protein, 413 aa, Glycine max
MAGLAPEGSQFDARQYDSKMNELLSADGQEFFTSYDEVYDSFDAMGLQENLLRGIYAYGFERPSAIQQRGIVPFCKGLDVIQQAQSGTGKTATFCSGILQQLDYGLVQCQALVLAPTRELAQQIEKVMRALGDYLGVKVHACVGGTSVREDQRILQAGVHTVVGTPGRVFDMLRRQSLRPDHIKMFVLDEADEMLSRGFKDQIYDIFQLLPGQIQVGVFSATMPPEALEITRKFMNKPVRILVKRDELTLEGIKQFYVNVDKEDWKLETLCDLYETLAITQSVIFVNTRRKVDWLTDKMRSNDHTVSATHGDMDQNTRDIIMREFRSGSSRVLITTDLLARGIDVQQVSLVINYDLPTQPENYLHRIGRSGRFGRKGVAINFVTLDDARMLSDIQKFYNVTVEELPSNVADLL

SEQ ID NO: 197 - DNA, 1703 bp, Glycine max
acgaggcgaaacgctcttcgttatctttttctcgactccgcggcgtagatccgaggagttcgggaaaccctaactcatcttccttcacaacagaacaacgcttcttttccctatccatcatctcaactgaagtcatggctggactagcacctgaggggtcacagttcgatgctcgtcaatatgattccaaaatgagtgacttactttcatctgatggacaggacttcttcacatcctatgacgaggtttatgatagttttgacgctatgggtttgcaggagaatcttctcaggggaatttacgcatacggttttgagaagccatcagccattcagcaaagggggatagttcccttctgcaagggacttgatgttattcaacaggctcaatctggaactgggaagacggctactttctgctctggtattctgcagcaacttgactatagcttgactcaatgccaggccttggttttggcaccaactcgtgagcttgctcagcagattgagaaagttatgcgggcacttggagattatcaaggtgtgaaggttcatgcttgtgtgggaggtaccagtgtgcgtgaggaccagcgcattctatctagtggtgttcatgttgtggttggtacccctggtcgtgtgtttgatatgctgcgccgacagtcacttcagccagaccacatcaagatgtttgtattggatgaggctgatgaaatgctttcccgaggtttcaaggatcagatctacgatatatttcagctgcttccatctaagattcaagtgggagttttctctgccacaatgcctcctgaggcccttgagatcaccaggaagtttatgaacaaacctgtgaggatccttgtgaagcgtgatgagctcaccttggagggtattaagcaattttatgtcaatgttgaaaaggaggaatggaagctggacacactctgcgatctttatgagacattagctatcactcagagtgtcatttttgttaacaccagaaggaaagttgattggttgactgacaagatgagaagccgtgaccacacagtctcagcaacccacggagacatggaccagaataccagggacattattatgcgtgaattccgttctgggtcttcccgtgtcttgataaccactgatcttttggctcgtggtattgatgtccaacaagtgtctctagttataaattttgatctcccaacacagcctgagaactatctccatcgtattggtcgtagtgggaggttcggaaggaagggtgttgcgatcaactttgtcacaaaggatgacgagaaaatgctgtttgacatccagaagttttacaacgtgcaagttgaggagctgccttcaaatgttgctgagctcctttgatcagattttgtcatccgtcgtattagatgaaattagtttgcgttttggaaactgttatgcaatgtttctcgctccccctttcgtttctttggttgtacttctgctcttaaactttgtttaataggcttagtaatttatgttaaattgtgagtttgtctgaatatccaagtaattattacttgctatgtggaaacccattattggcccaattggtgtacgactttcattgcatattcgattcttatgcaatcaacttagttcagttgtaatttggtcactaaatgaacttgaattggtgttaaaaaaaaaagaaaaaaaaaaaaaaaa

SEQ ID NO: 198 - protein, 413 aa, Glycine max
MAGLAPEGSQFDARQYDSKMSDLLSSDGQDFFTSYDEVYDSFDAMGLQENLLRGIYAYGFEKPSAIQQRGIVPFCKGLDVIQQAQSGTGKTATFCSGILQQLDYSLTQCQALVLAPTRELAQQIEKVMRALGDYQGVKVHACVGGTSVREDQRILSSGVHVVVGTPGRVFDMLRRQSLQPDHIKMFVLDEADEMLSRGFKDQIYDIFQLLPSKIQVGVFSATMPPEALEITRKFMNKPVRILVKRDELTLEGIKQFYVNVEKEEWKLDTLCDLYETLAITQSVIFVNTRRKVDWLTDKMRSRDHTVSATHGDMDQNTRDIIMREFRSGSSRVLITTDLLARGIDVQQVSLVINFDLPTQPENYLHRIGRSGRFGRKGVAINFVTKDDEKMLFDIQKFYNVQVEELPSNVAELL

SEQ ID NO: 199 - DNA, 1571 bp, Glycine max
gggagttaccctttctttttcttttttcttttttctctttcctcattctacttaaaactcccaccagtgatggcaggtttggctccagagggaacacaattcgatggtcgccaatatgatgctaagatgagtgaattgctttccactgatgggcaagaattcttcacctcttatgatgaagtgtatgacagctttgatgcaatgggattgcaagagaatcttctgcgaggcatatatgcttatggttttgagaggccttctgctatacagcaaaggggaattgttcctttctgcaaaggactggatgtgattcaacaggctcagtctggaacaggaaagacagcaacattttgttctggaattttgcagcagcttgattatggattggttcagtgccaggctttggttttggcaccaacaagggagctagcacagcagatcgagaaagttatgcgagctcttggtgattacttgggagttaaggtccatgcttgtgttggtgggacaagtgttcgtgaggatcagcgcattctccaagctggtgtccatactgttgttggcactcctgggcgagtgtttgacatgctgcggaggcagtctcttcgcccagattgcataaagatgtttgttttggatgaggctgatgaaatgctttcacgtggtttcaaggatcagatctatgacatcttccagctgctgccatccaaaattcaggttggagtgttctctgctacaatgccgccagaagcccttgaaattacaaggaagttcatgaataagccagtgagaatcctggtaaagcgtgatgaactgaccctggagggtataaagcagttttatgtcaatgttgacaaggaagagtggaagctggagacattatgtgacctttatgagactctggctatcactcagagtgtcatttttgtgaataccaggcgcaaggtggactggctcactgacaagatgcgaagcaatgaccacacagtctctgccacccatggtgacatggaccaaaacacacgtgatattatcatgcgtgaattccggtccggctcttctcgagttctcattaccacggaccttctggcccgtggtatcgatgtgcagcaagtgtctctggtcataaactatgatctgccaacccaacctgaaaactatctccaccgcataggacgtagtggtcgatttggaagaaaaggagttgctataaactttgtcacgacagatgattccaggatgctgtctgatattcagaagttctacaatgtgactgtagaggagctgccatcaaatgttgctgatttactctgatgagttaatgtttgttctctgttaagtcatcaggttcttattctatttggcaagtattatttgtgctcattttctctctatatattttacccattagagatcaaagacatgtgatctgatgctatttgtattggattctataaattttgtttaatcaattaattagcaggttgctgctcaagcctgcatttaaaaaaaaaaaaaaaaaaaaaaaaaaaaccccaaaaaaaaaaaaaaacggggcccctttaaaaaaaccc

SEQ ID NO: 200 - protein, 413 aa, Glycine max
MAGLAPEGTQFDGRQYDAKMSELLSTDGQEFFTSYDEVYDSFDAMGLQENLLRGIYAYGFERPSAIQQRGIVPFCKGLDVIQQAQSGTGKTATFCSGILQQLDYGLVQCQALVLAPTRELAQQIEKVMRALGDYLGVKVHACVGGTSVREDQRILQAGVHTVVGTPGRVFDMLRRQSLRPDCIKMFVLDEADEMLSRGFKDQIYDIFQLLPSKIQVGVFSATMPPEALEITRKFMNKPVRILVKRDELTLEGIKQFYVNVDKEEWKLETLCDLYETLAITQSVIFVNTRRKVDWLTDKMRSNDHTVSATHGDMDQNTRDIIMREFRSGSSRVLITTDLLARGIDVQQVSLVINYDLPTQPENYLHRIGRSGRFGRKGVAINFVTTDDSRMLSDIQKFYNVTVEELPSNVADLL

SEQ ID NO: 201 - DNA, 1675 bp, Hordeum vulgare
ctccattgctcaagacaaggccggccggcagaaaatggggacgcaggcagcggagaacgtcgacccgccggcaaaggatgtcaggacagatgagcaaaagaagatcgatgactggctcccgatcacgtcgtcgaggaacgccaagtgggggtactcggccttccacaatgtcaccgccatggttggcgcgggagtgctcagtctccccttcgccatgtccgagctcggctggggtcctggtatcgcggtgctgatcatctcgtgggtgatcacgctctacacgctgtggcagatggtggagatgcacgagatggtgcccgggaagcggttcgacaggtaccacgagctcgggcagcacgcgttcggcgacaagctgggcctctggatcgtggtgccgcagcagctcatcgtggaggtgggcgtgaacatcgtgtacatggtcaccggcgggaggtcgctcaagaagttccacgacgtgatctgcgacggcaagtgcaaggacatcaagctcagcttcttcatcatgatcttcgcgtccgtgcacttcgtgctctcgcagctccccaacttcaactccatctccggcgtgtccctggccgccgccgtcatgtcgctgtcctactcgaccatcgcgtggggcgcgtcggtggacaagggaaagatggtgaacgtggactacaacctccgcgccaccacgatgcccggcaaggtgttcggcttcttcggggcgctcggcgaggtggcgtttgcgtacgccggccacaatgtggtgctggagatccaggccaccatcccgtcgactccagagaagccctccaagaagcccatgtggaagggcgtggtggtggcctacatcgtcgttgcgctctgctacttccccgtcgccctcatcggctactgggcattcggcaacagcgtcgacgacaacatcctcatcaccctcaacaagcccaagtggctcatcgccatggccaacatgatggttgtcatccatgtcatcggaagctaccagatttacgcgatgccggtgttcgacatgatcgagacggtgctggtgaagaagctgcggttccctcccggcctcacactccgcttgattgcccggagcctctatgttgcgttcaccatgttcgtcgccatcaccttccctttcttcggcgggctgctcggtttcttcggcgggttcgcctttgcaccgacgacatacttcctaccctgcatcatgtggctcgccatctacaagcccaaaagattcagcctctcatggtgtaccaactgggtctgcatcgtccttggagtgtgcctgatgatcctgtcgccaatcggagggctcagacagatcatcatggattccaagacatacaagttctactcatagactacttctacgacgcattgtgtcttgtgaaaactgcaagagatcagttacgatgtctattacagactctcttgtctcgcaaaggaaaaagaaaggaacatcatagtaccacggactgttacagatgggatggtacttggtagatgcatatgttcagagaaaacttggtttagtcaaagcaaaagggttgtgtttggggttaatcatgtgtacgtaatatatatggtgtgtggatttgactctccgtactgtaggatcgacaatcttttttcccctcaaaaaaaaaaaaaaaaaaaa

SEQ ID NO: 202 - protein, 447 aa, Hordeum vulgare
MGTQAAENVDPPAKDVRTDEQKKIDDWLPITSSRNAKWGYSAFHNVTAMVGAGVLSLPFAMSELGWGPGIAVLIISWVITLYTLWQMVEMHEMVPGKRFDRYHELGQHAFGDKLGLWIVVPQQLIVEVGVNIVYMVTGGRSLKKFHDVICDGKCKDIKLSFFIMIFASVHFVLSQLPNFNSISGVSLAAAVMSLSYSTIAWGASVDKGKMVNVDYNLRATTMPGKVFGFFGALGEVAFAYAGHNVVLEIQATIPSTPEKPSKKPMWKGVVVAYIVVALCYFPVALIGYWAFGNSVDDNILITLNKPKWLIAMANMMVVIHVIGSYQIYAMPVFDMIETVLVKKLRFPPGLTLRLIARSLYVAFTMFVAITFPFFGGLLGFFGGFAFAPTTYFLPCIMWLAIYKPKRFSLSWCTNWVCIVLGVCLMILSPIGGLRQIIMDSKTYKFYS

SEQ ID NO: 203 - DNA, 2445 bp, Physcomitrella patens
gcagtactgcggaagagcaatagcgtatttggtcggttgagagctatgtcaacctgggattcatgggggttaacgggtcagatgctatggaagtacagcggaggtagtgtctttgcagcttaaccaggataccgcggcttcaagctggaacttttgcactgcaagggtgttcatgcttggcagctctaaggtagtcgccatgaacggggaggctaagaagttcgtgaggtttcggccattagaatctcaagtatctatgggttcggatcccaagacgccacttcgatcatcgtttagcgttgacagctccggtgtggcgacagggcgacgaggttggcagcgaagctcgaagggattcttcaagctaggccagtctttgaagttcaagagctcgtctcaggaatatgatgaggacatgcccaaagatttgcagtggaaaaccttggacccttcaagcccttcgttatacaaatggaacacgttcttccttgtctcttgtttggtggccatcttcgttgatcctctcttcttttacctccccaaggtggactacagtaatagttgcatcaggatatctagagacctgcaagcgtcggtaactgtcttccgaaccatctcagatttcttctacgtggttcatatggtgctccgtttccgaacggcgtttgttcgaccctcaactcgcgtgtttggacgtggggaacttgtgaccgatccccgggaaattgccatccggtatttgaaattcgatttttggatcgactttgttgcagtgttgccaattcctcaggttgttatttggctcgtggttccacacgtggatggtgttacttcgctgaacataaatacaaaagatgctttgcggtacattgtggtgtttcagtacgtgcctcgtatgttgcgtatcttccctcttctgtcgaaaatgatcaactccactggcgtgcttctggagactgcgtgggctggggcggcattcaacttgattttgtacatgctcgcaagccacatcctaggagcaacttggtacctgctatccgtggagcggcaagatacctgttggactgatgtgtgccttcgcaatgcgcccgacaaggctttgtgtcgcagagaaatttttgattgcgcctggcaaggcgcggcagtgaatgcttggtatggaaacttcaccactgattcgaacgtattttgcaattacattgcagtgcctatgggtgcagacacgttcaattatgggatctacaacaatgccataagcaatactatctcgtcaagcgaccttgctttttcccagacctatttcttctgcttgtggcagggcttgctagctcttagttcgttgtcccagaccttgaacgtgagtacatttgtaggggaaatcatctttaccataataattatcatcgtcggcttgttcctatttgccttcttgatcggcaacatgcagacatacttgcaatcgttgacacttaggctggaggaaatgcgagtgaaacgtcgagatactgagcaatggatgcgtcatcgcaatcttccccatgatatagtgcagagggtccgtcgctatgatcagtacaagtgggtggccactcggggagtggacgaagaaacgcttgtgcagagtctcccctctgacttacgtcgagacatcaaacgtcatctctgtttgcgacttgttcgcaatgtgccattctgtgatcagatggacgagagtttgctcgacgctatgtgcgagcgcctgaggcccgcactttgtaccgagggcacacacatcctccgagagggcgatccagtcaacgaaatgtttttcgttattcgtggtgaactgaaaagtgagactacgaacggaggccgaactggattttacaacaaagcagtcctctctagtggagatttctgtggtgaagagctactcacctgggctttggatcccaaaccccaaagtcatctcccaacctccacgtccagcgtgaaggcattgaaggaggtagaagctttctctttgtcttcagatgacttgaagtttattgccagccagttccgacgacttcacagcaaacaactgcaacacactttcaggtattattctaatcactggcgtacatggggagcctgcttcatccaagcggcgtggcgaagataccaacggcgacggttggcggagcttcgtcgcaaagaggaggatcaatacttgtccctgcaaggggaacccacagacaggatcagtctgggggcgacgatcctcgccgggaggttcgcgaagaatgccatgcgcggagtgcaacggcttcgaagcatgcacgctgcagagcttgcgcgaatctccaacatccccaagccttcggagtcagacttttcccaagacaattgaacggcttgatttgcgtattgtcactgttcttacagcacccgattctgcgtggctctctggctccacagtactgc

SEQ ID NO: 204 - protein, 732 aa, Physcomitrella patens
MLGSSKVVAMNGEAKKFVRFRPLESQVSMGSDPKTPLRSSFSVDSSGVATGRRGWQRSSKGFFKLGQSLKFKSSSQEYDEDMPKDLQWKTLDPSSPSLYKWNTFFLVSCLVAIFVDPLFFYLPKVDYSNSCIRISRDLQASVTVFRTISDFFYVVHMVLRFRTAFVRPSTRVFGRGELVTDPREIAIRYLKFDFWIDFVAVLPIPQVVIWLVVPHVDGVTSLNINTKDALRYIVVFQYVPRMLRIFPLLSKMINSTGVLLETAWAGAAFNLILYMLASHILGATWYLLSVERQDTCWTDVCLRNAPDKALCRREIFDCAWQGAAVNAWYGNFTTDSNVFCNYIAVPMGADTFNYGIYNNAISNTISSSDLAFSQTYFFCLWQGLLALSSLSQTLNVSTFVGEIIFTIIIIIVGLFLFAFLIGNMQTYLQSLTLRLEEMRVKRRDTEQWMRHRNLPHDIVQRVRRYDQYKWVATRGVDEETLVQSLPSDLRRDIKRHLCLRLVRNVPFCDQMDESLLDAMCERLRPALCTEGTHILREGDPVNEMFFVIRGELKSETTNGGRTGFYNKAVLSSGDFCGEELLTWALDPKPQSHLPTSTSSVKALKEVEAFSLSSDDLKFIASQFRRLHSKQLQHTFRYYSNHWRTWGACFIQAAWRRYQRRRLAELRRKEEDQYLSLQGEPTDRISLGATILAGRFAKNAMRGVQRLRSMHAAELARISNIPKPSESDFSQDN

SEQ ID NO: 205 - DNA, 1113 bp, Zea mays
atgatgatgatgggcgaaggcgtgagcatgccgccgtggtcccaccacgtccctgtgagcggcgtcgacgaaggcgacgagatgacgccgtacctgctcgcggcgctgcgccagtacctgccgtgcaacgacgccggcgccgaggccgaggaggatgaggcggcggcggcggccgccgccatggcggcgggcgtggacggctacggctgcgacgagttccgcatgtacgagttcaaggtccggcggtgcgcgcgcgcgcgcagccacgactggaccgagtgccccttcgcgcacccgggggagaaggcgcggcgccgcgacccgcgcaagtaccactactccggcgccgcctgcccggacttccgcaagggcgggtgcaagcgcggcgacggctgcgacatggcgcacggcgtcttcgagtgctggctccacccggcgcgctaccgcacccagccctgcaaggacggcacggcctgccgccgccgggtctgcttcttcgcgcacaccgcggaccagctgcgcgtgctcccgcccacgcctcagcagcagtccagccccaggggcgccgcctgctcttccccgctcgccgagtcctacgacggctccccgctccggcgccaggcgttcgagagctacctcaccaagagcatcatgtgctcgtcgccgaccagcaccctcctgtcgccgcccaagtcgcccccgtcggagtccccgccattgtcgcccgacttccgccgtgggtgctggccgggcgccgggtcccccgtcaacgacgtgctcgcctcgctccgccagctccgcctcagcagggccaactcgtccccgtcgggcggctggtgcggctaccctgcatccgcggtcgcgtacggatcgcctacggggggcgcgctctacggcctgtcctccaccccgagggccaccgccgcatcctgctacatggccaacctggaccctctcgacgtcagcttcggcggcgacgacgagcccgtggagagggtggagtccggccgcgccctccgcgcgaaggtgttcgagcggcttagcagggagggcgctgtttccggcgacgccggtggccccgacgtcggttgggtctccgacctcatcaactga

SEQ ID NO: 206 - protein, 370 aa, Zea mays
MMMMGEGVSMPPWSHHVPVSGVDEGDEMTPYLLAALRQYLPCNDAGAEAEEDEAAAAAAAMAAGVDGYGCDEFRMYEFKVRRCARARSHDWTECPFAHPGEKARRRDPRKYHYSGAACPDFRKGGCKRGDGCDMAHGVFECWLHPARYRTQPCKDGTACRRRVCFFAHTADQLRVLPPTPQQQSSPRGAACSSPLAESYDGSPLRRQAFESYLTKSIMCSSPTSTLLSPPKSPPSESPPLSPDFRRGCWPGAGSPVNDVLASLRQLRLSRANSSPSGGWCGYPASAVAYGSPTGGALYGLSSTPRATAASCYMANLDPLDVSFGGDDEPVERVESGRALRAKVFERLSREGAVSGDAGGPDVGWVSDLIN

SEQ ID NO: 207 - DNA, 1672 bp, Physcomitrella patens
atcccgggcacaaaggtgcagaagccaccaaagcaattgcgttgcactagatcttacaagagccccgcagcagagatatgtggttgctaagatctgagtaccgggaagactagataaagtgagaaagaaaaagagggagattgggacgttatttcgaggtttctgtagcgtgttgaggtttgtaattgtctctggctcggttagtgaacttgcttgagggcataggagttcaggagtagccacttgttgcgtgttcagtcttcaggaaacgtgcgcgtcaagacttggtgtttattaagagatcatcttgtagtcgttctgtgacgtatagcgatcaataagcagtttcagatttccagtggaagtgggaattagaatttggaaatttgtgggaggggttttgttggaacgatttcgcacctgtgtgctgtgggtaggagtgtgatttttgcaacgtaaggagcgtaaggacttggtcattaccatggtggagaagaacaggagccagagagctgcgacagaggttagggtaggtgcacggcattacttggctcccgtgaagaaggatctgaagtctgccgtgaagaatgaggagacgactgcaagccccaagtttaggggagttcgcatgcggcaatgggggaaatgggtctctgagatcagggagccgaacaagaggtcgagaatttggctaggttctttccccactgctgagatggctgcaagagcgtatgatgctgccgtggtatgtttgaggggacccggcgctactttgaatttccctgattcaccccctcaattgcttcccgaatgcaattcgcccaaggatatccaagtggctgctgctgccgctgccgcagccgcgaagccttgtactccagtagcgctccccgcaaaggctaaaatgcaattacttagtgctcaactcatcagcgtcaagaatgggacgaatttgtcacctagctcccaccaaactcctgcggaatcggattgctctggcaccacgggagaagggtcttcgagaagtggggcaaaatctgagattacgcaggatgaggagcttgattttacaggggagtcttcctctcccgtcgtcgcagaggagttcgtcagcttggaagacgttgaattggcttgggaagacgcgaaattcgatgatataaatttcttggacttgtagagcatagacttttctggtttaactccaacctcatgtttgagtatatgccaaggaaattggggtaatcaaattttggacgttggaggcgtcttccagttcaaaggcgagtttgaaccagatcgtgttatcaacgcaatcatggttcaaacttccgcgttattgtgctcgttgagttgatttctacatcgaattcagaatccgatcaagtgagaggcggcattgcaacatcagtcttcgacagaaaccatttctggaatcatttctccggaggtgcagcctgcggagataacacacacacgagagcctttccatcgaaggtagtgcagatagttatcccatataggaactttggcatcatctgtctttaccaccgtgcacaagctcatggaaccttttgcaccaatgtaaatttgtaggattgtaactcctcttcgatttttgacaccgtagactactttgagctgttcggagcaatcttccctccgagctccg

SEQ ID NO: 208 - protein, 231 aa, Physcomitrella patens
MVEKNRSQRAATEVRVGARHYLAPVKKDLKSAVKNEETTASPKFRGVRMRQWGKWVSEIREPNKRSRIWLGSFPTAEMAARAYDAAVVCLRGPGATLNFPDSPPQLLPECNSPKDIQVAAAAAAAAAKPCTPVALPAKAKMQLLSAQLISVKNGTNLSPSSHQTPAESDCSGTTGEGSSRSGAKSEITQDEELDFTGESSSPVVAEEFVSLEDVELAWEDAKFDDINFLDL

SEQ ID NO: 209 - DNA, 1193 bp, Brassica napus
attaactcattccccaaaacaacacatttttatcaaattctcaaacttttttctttaacatcattcctttttaccacccaaaacctccaattctaaaaacaaacaatggttaatttgttattggtgtctttggtataaagctcttcttacaagaaagatcaccaatgataggtttagagagtacgtccaagaactcttcgactaactcagttagtcaagagaacacgagagagaccaaaccggttagagattctggtaagcatccggtttacaggggtgtccgaaagaggagctggggaaaatgggtgtcggagataagagagccgaggaagaaatctcgtatatggctcggaacgtttccttcaccggagatggcggcgcgtgcacacgacgtagctgctttgagcatcaaaggaacctccgcgacacttaactttcctgacctcgtgggctctttcccacggccaagctctctcagccctcgagacatccaagccgcagctctcaaagctgcacacatggagatcattatgacgacctcacagtcttcttcttcttcgtctttaacgtcttcttcttcgctagagtctcttgtgtcttcctctgcgactggctcggaggagctagaggagattgttgagctgccgagtttagggtctagctatgatggtacgactcagctaagtaaagagttcattttctttgactcggcagacttttgggtttatccaccacatcagttgtcagaagttgattatgagatgattcctgggtcattatcacaggattgggatcttccaggactgtttaattattgagttataatcatataaaacatactctatatatgggtactagttatgatgttttaactatgttttagtgaaccctttattttgtggtgggtttgagttagggttatctgtctctggtcatcttttctcaatgtgtgttcgtgtgtgtgtgtgagtgagctccatatatcaatacttgtacataattctcgttttttttcttaagtcagtgttgaaatttctgaaaataaataatattggactagtagccaatataaggccacgtaccatatgttgaatgatgttgaatgttagttgttgatttgggattatcaatattccttttctatagtggaaatataaaactttttccggttaaccaaaaaaaaaaaaaaaaaa

SEQ ID NO: 210 - protein, 217 aa, Brassica napus
MIGLESTSKNSSTNSVSQENTRETKPVRDSGKHPVYRGVRKRSWGKWVSEIREPRKKSRIWLGTFPSPEMAARAHDVAALSIKGTSATLNFPDLVGSFPRPSSLSPRDIQAAALKAAHMEIIMTTSQSSSSSSLTSSSSLESLVSSSATGSEELEEIVELPSLGSSYDGTTQLSKEFIFFDSADFWVYPPHQLSEVDYEMIPGSLSQDWDLPGLFNY

SEQ ID NO: 211 - DNA, 366 bp, Zea mays
atggagtacgccgccgtcggctacggctacgggtacgggtacgacgagcgccaggagccggcggagtccgcggacggcggcggcggcggcgacgacgagtacgcgacggtgctgtcggcgccacccaagcggccggcggggcggaccaagttccgggagacgcggcaccccgtgtaccgcggcgtgcggcggcgcgggcccgcggggcgctgggtgtgcgaggtccgcgagcccaacaagaagtcgcgcatctggctcggcaccttcgccacccccgaggccgccgcgcgcgcgcacgacgtggccgcgctggccctgcggggccgcgccgcgtgcctcaacttcgccgactcggcgcgccactag

SEQ ID NO: 212 - protein, 121 aa, Zea mays
MEYAAVGYGYGYGYDERQEPAESADGGGGGDDEYATVLSAPPKRPAGRTKFRETRHPVYRGVRRRGPAGRWVCEVREPNKKSRIWLGTFATPEAAARAHDVAALALRGRAACLNFADSARH

SEQ ID NO: 213 - DNA, 884 bp, Brassica napus
cttcccaccaaagtagccctttcgtaacatttgatggatcactcatcttcttcggaatcacatcttgatgactacaggagaaggcctcaggccaaggccacagcgagagcagtgaataataataaaaatatcaagaagaaaagagtcaaagaagatcttgatgatgatgaaaagattaatgtttcaaagcatcaaagttttagaggggtgagaatgaggcaatggggaaaatgggtctcggagatcagagagccaaagaagaaatctagaatctggcttggtaccttccccacggcggagatggctgctcgtgctcacgacgtggcggctttagccataaaaggtgactctgctcatctcaacttcccggagctagcctaccacctccctagaccggctagtgcccaccctaaagacatccaagcagccgcagcggaggctgcagcttcagtagtcattgatatggacatagagacgtcgtcaccttctaccggagccacggaactgtcgcctcctgctgtggcctcaacagccgatgacgcgttctccgaccttccggacctcttcctcgacgtgaaccacaaaaacgatggcttttgggagtccttcccttacgaggaacccttcttctcgggaagttactagaaaacaaagacggtgtggtctttgtttcgttttttttttgtcatgtgaaactttttgaggtgaaaaatcacctgttgattcaaatagtataattatttgttttttttttctctttttatttctttttttgtaaaacttttacgtgggtaaatgcatgtgtgatatgtaagtttttttttgcttaaagatatgtaagctataaatgttatttgttttgtaacaaaaaaaaaaaaaaaaaa

SEQ ID NO: 214 - protein, 203 aa, Brassica napus
MDHSSSSESHLDDYRRRPQAKATARAVNNNKNIKKKRVKEDLDDDEKINVSKHQSFRGVRMRQWGKWVSEIREPKKKSRIWLGTFPTAEMAARAHDVAALAIKGDSAHLNFPELAYHLPRPASAHPKDIQAAAAEAAASVVIDMDIETSSPSTGATELSPPAVASTADDAFSDLPDLFLDVNHKNDGFWESFPYEEPFFSGSY

SEQ ID NO: 215 - DNA, 958 bp, Brassica napus
gtcaccaacaacgataagaacaatctcctcatctcttgataaataccacattgtccaatcaagctacgtagcctcggatcaatacacacaacaccattaattacaatggtgaaacaagaactcaatatcaagaaggaaatgtcattgtcacctccgtcttctccaaagatcaagagcaagaagaataagattaagaagtacaaaggagtgaggatgagaagttggggatcatgggtgtctgagattagggcaccaaataaaaagataaggatttggttgggctcttactcaacagctgaagcagcagctagggcttatgatgttgcactcttgtgtctaaaaggccctcaagccaatctcaacttccccagctctgcttcttctcgccttctgttagatgaaaagacccatttgtcccccaaatccatccaaaaaattgccgctcaagcagccaacaattcatttgacctttttgctccatcttcatcggcagattcgtcaccgttcgatcatgatcaacatcctgatgacatgcaatctttgatagggtctttcgtagacaatcgtgtgtctttgatggatccatcatcatcgtggtatgataatgatcataatgggatgttcttcttcgatgatggagctccgtttaattactctcctccactgaactcgaccacgaatatggtcgatgggtatttctacgaagatgctgatattccactttggagtttcagttgatctgacggtccagaatacatactttactatatatgttttattatttacaaaattatttttatatgttaattaatttaccttacacaaaaatgataactaatttacccttgtcgtaaaaaaaaaaaaaaaaaaaaaaaaaaaaaaaaaaaaaaaaaaaaaaaaaaaaaaaaaaaaaaaaaaaaaaaaaaaaaaaaaaaaaaaaaaaaaaaaaaaaaaaaaa

SEQ ID NO: 216 - protein, 210 aa, Brassica napus
MVKQELNIKKEMSLSPPSSPKIKSKKNKIKKYKGVRMRSWGSWVSEIRAPNKKIRIWLGSYSTAEAAARAYDVALLCLKGPQANLNFPSSASSRLLLDEKTHLSPKSIQKIAAQAANNSFDLFAPSSSADSSPFDHDQHPDDMQSLIGSFVDNRVSLMDPSSSWYDNDHNGMFFFDDGAPFNYSPPLNSTTNMVDGYFYEDADIPLWSFS

SEQ ID NO: 217 - DNA, 821 bp, Brassica napus
tgaagagcagagctaaaccaaagcagaatcgtaccgtactgaattgaattgaattgaaccgggttggtttgctgtttctatatttggtttagtgatggatcagggaccgtcgtcgtcaaagtacaaaggcgtgaggaagaggaagtgggggaagtgggtttcggagatcagacttcccaacagcagagagcgtatctggttgggatcttacgactctcccgagaaggcggcgcgcgccttcgacgccgctctttactgcctccgaggaagcggcaccaagttcaatttcccggataatcctccggcgatcagcggcggagggaacatgtcgcgatcggagatccgagacgccgccgcgaggttcgctaattcggaagagagtgtggcgagtgagatggtggtgcagcagcaagagtctccttcgacgacgatggcgattgattcggagtttttgagtatgcttccgacggtcgggtcgggtaattttgcttcggatttcgggttgtttcccgggttcgatgatttcgcggacgaatttttaggtgatcgttttgtagaacaggtttcgcctacgtggaatggggatgagagttgttatgatggctctgtgtctctttggaatttttgaagctagcagagagaatctgcgattttgtttttccttttttgggaggtatgacgggccccatcaaatttgtttcattttgtatccacaactttagtttggatatgtttattttttttgtaacttccccccactttttgggacatcatcttaccatactaaaaaggaaaataagcccaaaaaaaaaaaaaaaaaa

SEQ ID NO: 218 - protein, 177 aa, Brassica napus
MDQGPSSSKYKGVRKRKWGKWVSEIRLPNSRERIWLGSYDSPEKAARAFDAALYCLRGSGTKFNFPDNPPAISGGGNMSRSEIRDAAARFANSEESVASEMVVQQQESPSTTMAIDSEFLSMLPTVGSGNFASDFGLFPGFDDFADEFLGDRFVEQVSPTWNGDESCYDGSVSLWNF

SEQ ID NO: 219 - DNA, 878 bp, Brassica napus
cgctgtctctcaccccaaactacaaaaaaaacacacaaacttttttcttacttcctctagatgcaagactcttctcttccccggtcggaacgtaatctccggtcactagtgccggagagaaccggaaagaactcgaagtctaaaaatgagcaaaagagtgtttccaagcatcccaattttcgtggggtcagaatgagacaatggggaaaatgggtgtctgagatcagagagccaagaaagaaatcaagaatttggctgggcactttctccacaccggagatggcggcgcgtgcacacgacgtggcggctttagccatcaaaggcggctctgctcacctcaatttccctgagctcgcttgccatttgccgagaccggccagcgcagatcctaaagacattcaagccgccgctgcagcagccgcagtggaatggaaagccccggagtcaccgtctagcacggggacgtcatctatgacgtcatcttcagtcgcggacgacgctttctccgacctccctgatcttttggtagacgcgaatgatcacaaagtggacggtttctgggactcgtttccctacgaagaacctttcttcatgggaaactattaggaaactgaaagacggcaacttccggctggtgaatgtttttcccggtaaagatgggagatggtgtcgatatgtaagttttgtctttgtgggaaaatttttgctttatttttattttttttatttacgtgtgagtaagtttccaaatgtatgacgtgtaagtaaagaaaaaggtacaggtttagttattttattttccttttgtttttttgtacaaattcgaatgtaattaacaaaatgttttgtttaaaaaaaataaaaaaaaaaaaaaaaaa

SEQ ID NO: 220 - protein, 181 aa, Brassica napus
MQDSSLPRSERNLRSLVPERTGKNSKSKNEQKSVSKHPNFRGVRMRQWGKWVSEIREPRKKSRIWLGTFSTPEMAARAHDVAALAIKGGSAHLNFPELACHLPRPASADPKDIQAAAAAAAVEWKAPESPSSTGTSSMTSSSVADDAFSDLPDLLVDANDHKVDGFWDSFPYEEPFFMGNY

SEQ ID NO: 221 - DNA, 968 bp, Brassica napus
ctttctctcaagcctttatataaaccctacctaatacgtacgtactctcctcacactcactgagtcatcaaaacctacgtgtcaatgaccgagtcatccatttcctccgtcaaacaaccttctccggtggaagaggagactcatcaccaccgagaagatgaagagacccatcgaacaaataagaagaaacgggctagacccgacccgtgttatagaggcgtacggatgcgaacgtggggcaaatgggtctccgagatccgcgagccacgcaagaagagccgaatctggctcggcaccttctccacggcggagatggcggcgcgtgcgcacgacgcagctgctttaaccatcaaaggaccctcagccgtcctcaacttcccggagctagccactttccttcctcgtccagcttcctcctctccacgcgacgttcaagctgcagccgccgtagccgccgccatggacttttcctcctcctcctcctctgccggcgttatctctgatcccaccaccgttgtccccgagtcgcagttatcttcttcaagtagctacttgtcgtttacatcgtcttcaacattgtcaccgtcgagcgaagaagcagcatcatcaacggcggaagaactgagcgagatagtcgagttgccgagtctagagacgagttacgatgagccgtggagcgagttcgtgtacgttgacccggcgtatccacctagttcgccttggtattttaataactgttatagcttttattaccacagcgacgaaactggcacttcgatgggtgaaccttttgactcttccaacttttgtctttttccttagtttaatttctcctgatttttcttttccattgtagaccattttctttgaggtttatttaattattggtttcacaacagtgtttaatatactcgattaaacctggttttatcaaataatatatgtttcacaaaaaaaaaaaaaaaaaa

SEQ ID NO: 222 - protein, 245 aa, Brassica napus
MTESSISSVKQPSPVEEETHHHREDEETHRTNKKKRARPDPCYRGVRMRTWGKWVSEIREPRKKSRIWLGTFSTAEMAARAHDAAALTIKGPSAVLNFPELATFLPRPASSSPRDVQAAAAVAAAMDFSSSSSSAGVISDPTTVVPESQLSSSSSYLSFTSSSTLSPSSEEAASSTAEELSEIVELPSLETSYDEPWSEFVYVDPAYPPSSPWYFNNCYSFYYHSDETGTSMGEPFDSSNFCLFP

SEQ ID NO: 223 - DNA, 983 bp, Glycine max
tctgtcactgtcatagggacatacatacattttcaccttcacacatcaaaccaacaagaactttctattccttaaaccatggtcgagcctgcagtagcagcaagctcagaattatcagactcaacacgaaacaccaacaccaacaccccttcaccctcttcctcatcgtcgttatctccgtcgccatcaccgtcatcatcaagctctaaaaagcgagcgagagacaacaacaatagtagaaacaacagcaacaagcattctgtgtatagaggtgtccgaatgcgcacgtggggcaaatgggtgtcggaaatccgcgagccgcgaaagaagaaccgaatctggctcggcaccttcgccaccgccgagatggcggcgcgtgcccacgacgtggcggcgctgacgataaaaggctcatccgccatccttaacttccccgaactcgccgcctccctgccccggccggcctccaactcgccccgcgacgtgcaggccgcggcagccaaggcggcgtccatggaggcgccgccgcggacccctccgtcgccggccgccacgccggaggatgacctcggcgagatcgtggagctgccgccgctcggaacgagtttcgactcgcccgaccggagttccgagtttgtgttcctggacatggacgacgggtggccctattctcacccgtggtaccacagcatttatgatggtgggtacttcattagcgacatgaacaacatggtttcgatgcaagagtcagagagcatggttctttccctgtggccttgaagttaagccaatgctactcattgcagtatggttatattttggttctttttttttttttttgcgtgagacagataatcatgtttctgttcttaagtatgcgattagggattggattttcatgtccgtatatatgaaataacatttatttgccgatatcaatctcttgaatgaacatcaatacattgaaaaaaaaaaaaaaaaaa

SEQ ID NO: 224 - protein, 233 aa, Glycine max
MVEPAVAASSELSDSTRNTNTNTPSPSSSSSLSPSPSPSSSSSKKRARDNNNSRNNSNKHSVYRGVRMRTWGKWVSEIREPRKKNRIWLGTFATAEMAARAHDVAALTIKGSSAILNFPELAASLPRPASNSPRDVQAAAAKAASMEAPPRTPPSPAATPEDDLGEIVELPPLGTSFDSPDRSSEFVFLDMDDGWPYSHPWYHSIYDGGYFISDMNNMVSMQESESMVLSLWP

SEQ ID NO: 225 - DNA, 1097 bp, Glycine max
taaacctacatatccaaccctcatataaatacgccattaccctacaaccatatattatacacatagctagacatggtgaaaccagccatggctagtgttgattcttcttccttttcttcttgtaaaaatgattcattttcctctaactacagcattgatacttgcaagatgtacaaaggggtaaggaagagaaaatggggcaaatgggtgtccgaaattcggcttcccaacagccgtgagcgcatatggttggggtcctatgacacccaagtgaaggcggccagagcatttgatgtcgcactttattgcctacgtggcaaaagtgcgagtttcaactttcctgacacacctcgacacttggaaattaatatggtgttaccatgtgacatacaacaacaacctctctcccatccggagattcaagagatagcctcgaagtttgcgaacaacgaccacgtccctttggaggaggagagtgcttttcaagaacaagaacaagacccctcgatggagtcacaaagtgacgagtctaaatctgccaatacaataacggagatgagcaacttccctaatatttatgatggtggaactcatactaatgtacaagtggatcaattacaaggggattgggacagcatggattggacattttttaacatgttggatgacttgaatggctcggattttggcctctatttggggccagacaagttgcacccgggtgagtttttgtgtcccactcaagctccaatgctttttcatgaggatgaaattgaaggtgatgatgatcatgatgctttttctaaccattccttactttggagttggaacttttgattcacctgcaaattaacttagataccctctactttgcataagtttcaactagtaaataattactagcaagcaagcctctctattatgtttttttgtagccatttatacatggctgtttctcaattataatagttaggctatgactagagtttatgtcaaatggaccataaagacaaaaagaaaaaagaccatataccatgccataaataatattatagaaagtggcccggtttttattgcctaaaaaaaaaaaaaaaaaa

SEQ ID NO: 226 - protein, 254 aa, Glycine max
MVKPAMASVDSSSFSSCKNDSFSSNYSIDTCKMYKGVRKRKWGKWVSEIRLPNSRERIWLGSYDTQVKAARAFDVALYCLRGKSASFNFPDTPRHLEINMVLPCDIQQQPLSHPEIQEIASKFANNDHVPLEEESAFQEQEQDPSMESQSDESKSANTITEMSNFPNIYDGGTHTNVQVDQLQGDWDSMDWTFFNMLDDLNGSDFGLYLGPDKLHPGEFLCPTQAPMLFHEDEIEGDDDHDAFSNHSLLWSWNF

SEQ ID NO: 227 - DNA, 1181 bp, Glycine max
ttctccaactcacaccattttgtttaataaaacttgtgatggaaattcaattccaacaaccaaacctgcagcatcagaaatcaggcattgcaatcaccaaaggtggcaagttcaaagggagaagcagaaacaacaacaccaacaaatttgttggggtgagacaaaggccctcagggagatgggtagctgagatcaaagacacaactcagaagataagaatgtggcttggcacatttgagacagctgaggaagcagcaagagcctatgatgaagccgcgtgccttcttcgcggatccaacactcgcaccaacttcatcactcatgtctccttggattcccctcttgcttctcgaattcgaaatcttcttaacaacagaaaaggtatcaaaaaagaggaagatgctaatgctaatgctaataatgcacctgccccaagagttagcactactagcagtgctactagcactggtactagtagtaattcaagcaatggaaatgacaacaatgaccagtctctttctaccgtaacaactcaaagttcaaatctgtttgatgatgcctataaaccagatttgagcaattgcagggaggagtttgagtcaggtcatcagtccaatacttcatggtgttttggacctgtctttgatcgtttccctatggctcaaatattcgatataccaaagattgatgatggcctcactaatgcagctgatttggatctttcagaatttgaaagaatgaaagttgaaagacaaatatcagcttcactctatgcaattaatggggtgcaagagtacatggaaactgttcaggactccaatgaaactctctgggatcttccacccttatgctcattgttctgttaatcttgaaggtttaaatgatcctgcaattattccttctcaatgtcctatttattttactattattgaagatttgaggaaggggtgtgggatctaaggattgattgaaatattacaataacaatatagctttggtgagatataattttgtttttctaactgcttaatgtcagcaggaagatccatgagttgcattttgtgaaagctctttttcaatcattattatgtaaaaagtctaagcatttatgttccttttttcacatcctaaatgtcaaaaagtaaatcttcaaatctttttgcaaaaaaaaaaaaaaaaaa

SEQ ID NO: 228 - protein, 275 aa, Glycine max
MEIQFQQPNLQHQKSGIAITKGGKFKGRSRNNNTNKFVGVRQRPSGRWVAEIKDTTQKIRMWLGTFETAEEAARAYDEAACLLRGSNTRTNFITHVSLDSPLASRIRNLLNNRKGIKKEEDANANANNAPAPRVSTTSSATSTGTSSNSSNGNDNNDQSLSTVTTQSSNLFDDAYKPDLSNCREEFESGHQSNTSWCFGPVFDRFPMAQIFDIPKIDDGLTNAADLDLSEFERMKVERQISASLYAINGVQEYMETVQDSNETLWDLPPLCSLFC

SEQ ID NO: 229 - DNA, 1095 bp, Glycine max
cgcagccaaaacaacaactaacgacaaagattcttccccaacacaagggaaaaccggagcaacaaaaaaagtaacacacacgcacacacgcatcatcgtataacatttgttttattttttttaaagagcgagtgttgtaacaaatggtgaagtcgaagagcgtggagaaacctgcggaggaacaacaacgaggtggtgtttcagcgtacagaggagtacggaagaggaagtgggggaagtacgtgtcggaaattaggctgcccaacagccgtcaaaggatttggttgggttcctacgacagcgccgaaaaggcggcgcgtgcattcgacgcggccatgttctgcttacgtggcagcggtgccaactttaatttcccgagcgaccggcccaacatcgctggcgggaggaacatgacgccctcgcagattcagatcgccgcggcgcgtttcgccaattcggagccccgaaaggagtgttcgggtaaacccgtggagtctttgacttcgattgaggaaacgacgtcgtttccagtaaattcggatacggatacatcttctcctctatcagtagtgacgatccaaaacgacaccgaagtagcaaccgggtcgtttccgggtatattttcgggtttcgggtcgggtaatttcgtccccgaattctccgattttccgagcttcgatgatttcggccacgatttcttcgtgcatgagcttccgggtttcgattacggagaagagaacttggatgggttgataattcaggactcgttcctgtggaatttctaagcgggtcggggttaggataattttattatatcccaaccgtgtttagaattcggatcggatccggatttgggttggtcaatttttgtgagaccatgccctctgtgttagtagttagtgatggtaatgttttttttatgtacctagtagtcaaggtttcgattttttgggatgagaatcataatttatttatttgtcatgactcatgtcattaattgtaaagttgtctgctgatagtgtaattttcttttggccattcattcaattataaaaatgataagatattttcgtctgcaaaaaaaaaaaaaaaaaa

SEQ ID NO: 230 - protein, 213 aa, Glycine max
MVKSKSVEKPAEEQQRGGVSAYRGVRKRKWGKYVSEIRLPNSRQRIWLGSYDSAEKAARAFDAAMFCLRGSGANFNFPSDRPNIAGGRNMTPSQIQIAAARFANSEPRKECSGKPVESLTSIEETTSFPVNSDTDTSSPLSVVTIQNDTEVATGSFPGIFSGFGSGNFVPEFSDFPSFDDFGHDFFVHELPGFDYGEENLDGLIIQDSFLWNF

SEQ ID NO: 231 - DNA, 1174 bp, Helianthus annuus
cgattgccgtcggaagaggaattctcgaagccggtgtggtggaccgaaagcagtagccgaaacactagcgaaatggaaggagtacaataataaaatcgattcgttggacgagaaagcgaagcctgtacggaaagtgcccgcaaaagggtcgaaaaaagggtgtatgaaaggtaaaggcgggcccgaaaactcgcggtgcaaataccgaggcgtaagacaacgaacatggggaaaatgggtggccgagattcgggaacccaatcgagggaggaggttatggttagggacttttgggtctgcggttgaagcagcccgggcttatgatgaagcggcccgggttatgtatgggccctgtgcgcgcctcaatatgcccgattctggttcgggtccgggttcgggttcgatgaacgagtgttcgaagatggggtctaatggtgcttctagttgtgattcgaccacaacgtgtagtcactcggaggagattataccgtggtcaaatcgacaaacggttaatcaggatgaaggcgagtcaaacagcggtcaactgttgaccatggtcagacaagaagttaaagaagaacccattgaagaaaaagttgaaatgacaaaggatgttgattttcaaaatatggaagagcttacggaaacgatggcgcaaagggacacaggaccccacgtagatcacgtggggtcccttgagcctcctgatgaggctgagaacgaaccatgtagccaagatggtagtgagccaacatctggttatgggttcggtttctctaaccgagaaccccctgatgtgttcagggggctcgatgatatgctttggcttgagccagcgagacaagacgggtgtggggttgtagcggattacgggttcgatttcttgaagccggggcggcccgaagagtgcaacttcacattggaagagttggggttcaatttgggggctgattttggtgtgtgagcagagacaagagtgaaacattactaattgtttacatgttttttaagaatttttaggcaacatattgataaagttggtgtattgtaggtggaacaaagatactattgtgccttgtagatcgttcgtaggtttgtataaattggttcgtgttgttaacccgaagctagtttgtatagaacttaaattttcggcaaaaaaaaaaaaaaaaaa

SEQ ID NO: 232 - protein, 266 aa, Helianthus annuus
MKGKGGPENSRCKYRGVRQRTWGKWVAEIREPNRGRRLWLGTFGSAVEAARAYDEAARVMYGPCARLNMPDSGSGPGSGSMNECSKMGSNGASSCDSTTTCSHSEEIIPWSNRQTVNQDEGESNSGQLLTMVRQEVKEEPIEEKVEMTKDVDFQNMEELTETMAQRDTGPHVDHVGSLEPPDEAENEPCSQDGSEPTSGYGFGFSNREPPDVFRGLDDMLWLEPARQDGCGVVADYGFDFLKPGRPEECNFTLEELGFNLGADFGV

SEQ ID NO: 233 - DNA, 847 bp, Helianthus annuus
gcttacttcctcacaagctctcttatctttacctaccaccatcactcgataataataataacaataacatgaatcacaacaccgccaccgctaccacaaccaccaccaaacgccccaaacccggggaccttaacgatgaagttacaaaaaaaacaaagaaaaccgacattgatcaaataaaccaccctgtataccgcggtgtacgcaagcggagttggggaaaatgggtgtcagaaatccgcgagccaaagaaaaaatcaagaatatggcttgggacttttgacaccccagagatggcggcccgggcccatgatgtagctgcggtcgccatcaaaggtaactcggccatcctcaacttccctgagctggctcaccaactccccaagccggcttcaaactcccctagagatatccaagccgcggctcttaaagccgccacgttggtccttcgaagccttaattccgataaagatgatcaatccgagccaacccggattgatcaacttccatgttcttcgtcttcatcttcatgttcacttcaaagtgatataacggatgacccgtttcttgatttgccggatctttatatggacctcgggtaccggatttttaacacattgtcagagaagattactggtaacaatgaattctggccagaagatcatttcttgtggagctatagctaaaaatgtttttgtgctaaaataataataatattatattgttgttacgtctagaaacttaaattttattatttgtgagattgaaatctatattgtttttttgctcatttttgtaaattaagtaagttgatttatggccaaaaaaaaaaaaaaaaaaaaaaaaa

SEQ ID NO: 234 - protein, 205 aa, Helianthus annuus
MNHNTATATTTTTKRPKPGDLNDEVTKKTKKTDIDQINHPVYRGVRKRSWGKWVSEIREPKKKSRIWLGTFDTPEMAARAHDVAAVAIKGNSAILNFPELAHQLPKPASNSPRDIQAAALKAATLVLRSLNSDKDDQSEPTRIDQLPCSSSSSSCSLQSDITDDPFLDLPDLYMDLGYRIFNTLSEKITGNNEFWPEDHFLWSYS

SEQ ID NO: 235 - DNA, 907 bp, Helianthus annuus
tcaatttcaagttttcaacagcaagcaagcaagcaagcaacgatgtgtggtggtgctatcgtctccgatctcatccgttcttcacgccgcctcaaaaactcctcctctgatgtctggcccgaattcaacccatatgaagcagaattcaacaactcatatgaagcagaattcaaccaatttgtccaacaaaccgattccgattatcacaagcgacctcttccatattcaggtgggatgcatgaaaccaccaggaaaaaacagaggaagaatctgtaccgtgggatacggcagcgcccatgggggaaatgggcggcggagattcgcgatcctagaaaaggcgttagggtttggttgggtactttcaacacagcggaagaagctgctagagcttacgacaaagaagctcgtaaaatccgaggaagaaaagctaaggttaattttccaagcgatgaagaagaagagtattttaatcgcaaaaaccccaacctgaataactataacgatattcttctcgggttttctgacgaagaagttatgggtccgcgtttggtgaaagaaaacgagaagaagaagaagaaagttgaagaagttgtacagaaggaagagaatgaggtgcagaagctgtcggaggagctgatggcgtatgagtcgtatatgaagttttatgatattccgtatcttgaagggcagccgtcggcggtggctccggcgaatgcagacggtggtggttcgattgagctttggagctttgatgatgtagcgtgatttggaagtttacccttctgcgtgttttttttagtttaagtttaaataattttgtgtttaataatgtaaattgctgtgtttgaacttctatatgtgttgggcataaaactaagaagtttggtataaaaaaaaaaaaaaaaaa

SEQ ID NO: 236 - protein, 240 aa, Helianthus annuus
MCGGAIVSDLIRSSRRLKNSSSDVWPEFNPYEAEFNNSYEAEFNQFVQQTDSDYHKRPLPYSGGMHETTRKKQRKNLYRGIRQRPWGKWAAEIRDPRKGVRVWLGTFNTAEEAARAYDKEARKIRGRKAKVNFPSDEEEEYFNRKNPNLNNYNDILLGFSDEEVMGPRLVKENEKKKKKVEEVVQKEENEVQKLSEELMAYESYMKFYDIPYLEGQPSAVAPANADGGGSIELWSFDDVA

SEQ ID NO: 237 - DNA, 806 bp, Helianthus annuus
cccacctccataaaaaccatctcttttcatggcggccagttttcatttaatcccataatatttatttatacacacgaccacttgtatacgtacctcacacttttccttttccttttaaaaggtgtcggtgttttcgaccatcttctccttttccaatcaccaaaaccaatggaagccatcatcaccggcggcggagatgggccgtgcaaccgtccgccggagaaaaggaagagtgatcaacggccgtacaaggggatacgcatgaggaagtggggaaaatgggtggcggagattcgggagccgaataagcggtccaggatttggttggggtcctattcgacgcccgtggccgctgcacgggcgtacgacacggccgtatactacctacggggcccgacggccaggttgaattttcccgaattattggggtctgacgtggcgttcggggagttgtcggcggcgagtattcggaaaaaggcgatagaggttggggccagagtggatgcagagacgagttgtacgtcgttgcttaggagtggtacgcgtgtacccgggtctgggcttaaggcgtgttggtttcaggagaaacccgacttgaatatgaaacccgaacccgaggagaatgatggagattattggtgatggatacaatacgaggatgggttggtttggtgggtcggtcggtcggggcagttggatggaagatattttctttctttttttttttaagtgaagtgttttgttatcttggaaacagatgaaacaagttttgatgtttacaaggaaaaaaaaaaaaaaaaaaaaaa

SEQ ID NO: 238 - protein, 157 aa, Helianthus annuus
MEAIITGGGDGPCNRPPEKRKSDQRPYKGIRMRKWGKWVAEIREPNKRSRIWLGSYSTPVAAARAYDTAVYYLRGPTARLNFPELLGSDVAFGELSAASIRKKAIEVGARVDAETSCTSLLRSGTRVPGSGLKACWFQEKPDLNMKPEPEENDGDYW

SEQ ID NO: 239 - DNA, 945 bp, Linum usitatissimum
acaaaataccctctctgtttctccatctcaatcccaatgtccacgtcatcatccagcacgggcgaaccggggtccaactggaacccccatatgaaaaaggcggcccaagccagctcgagaaaggggtgcatgcgtgggaaaggcgggccggagaacgcactatgcagctacaagggagtgaggcaacgcacgtggggtaaatgggttgcagagatcagggaacccaaccgcggcgctcgtctctggctcggcaccttcgacacctcccacgacgccgctttggcctacgacactgccgctcgtaagctctacggtcctcacgccaagctcaacttgcccaaccacaacgacgtcgttcacgttccgaaacaggattcaggggatgcgaccactactactagtagtagttttgatatgccggcaggctattataataattattcgtcgaattcttcgagcgaggaggggataagtagcagtagttatgataattacaatgagataggagtggggaacgagttctggtccaatttgcaggtgaatttgccgttgtttgatgaatccatatgggcggaggctgccatgtcactggactactttccggtggtggcaatggacggcgggcagttggccggcggctgggatgctgcttctgcttccgcgcctaactagtagtaatgaatacataggtgcatgtaaattattataaggggaattaattaatcaattaagattgtgtgtgctatgcaaccattaattagctggtctgtattggattaagatatatctaaacaagtgtgtaaataaagtgttaagtataagcactactggtagcagcagcttgtggtttaagctgctggcttttctgtgtatcttgtttgtgaatactaatatactataaaaatagatagttgctcttaaaggccgaaaaaaaaaaaaaaaaaa

SEQ ID NO: 240 - protein, 211 aa, Linum usitatissimum
MSTSSSSTGEPGSNWNPHMKKAAQASSRKGCMRGKGGPENALCSYKGVRQRTWGKWVAEIREPNRGARLWLGTFDTSHDAALAYDTAARKLYGPHAKLNLPNHNDVVHVPKQDSGDATTTTSSSFDMPAGYYNNYSSNSSSEEGISSSSYDNYNEIGVGNEFWSNLQVNLPLFDESIWAEAAMSLDYFPVVAMDGGQLAGGWDAASASAPN

SEQ ID NO: 241 - DNA, 1201 bp, Linum usitatissimum
gctagccctctccttattataaaatctatccattgaaaaatgcccaacgccacgtcatcatcaacatccgaccactgcccaaaacctcgggcgagcagtggcagctcaaggaaagggtgtatgcgtggcaaaggcggccccgagaacgccctctgcacctacaaaggtgtccgacagcgtacttggggcaaatgggtcgccgagatccgcgagcccaaccgcggggcccgcctctggctcggcaccttcgacacctcccacgacgccgccttagcctacgacgccgccgctcgtaagctctacgggcccgacgccaaactcaatttgccccacttccacaactcccccaacaataccaatcataataatatcgtcccccacgtggatgtacacgtgcctctatcacttatttcctctggtggtcccaccctttctccttctttcacctcttcctcctcctccaataatggtcccactttcacatccaataatgctgacgtgggctaccgtgggtttgacctgccgttacacggtggtgatggtggtcagtgggtggatcactactcgagttccgactggaagaacaccgactcatcagcagctgcagcagcagcggacgccagttgtaattataattacaaggtaggaggaaacgaggtgtggtctaatttgaacgccaatttgcccttgatggacgactccatttgggtggaggccgccatgtctttggactactttcaggtggcggcgatgcaggattctaacggctgggatacggcggcgcttccgccgtccaataccaccccctggtgcatctaattttaggaacaatatattagatactagtcttgggaaagaagttatcatcactttagagacaacatattatatatataatggaagaatgaagggtgggatagaaataaaagggaaacatatatatatatagggacgtgtatatagttccaaaagagggaaatgctaactgctgtacagtatacaagccgccgcaacagccttacgatgtttcattttagtggcggctgtctccctgtcactgtcgatatgtatatgagatcgtcttctgtgtaaatactgtgtatcataggtgctctttgaattctggtttgggaaaataatttactcacgtgtgtgtataattaggccacgtgctcaaattagcaaaaaaaaaaaaaaaaaa

SEQ ID NO: 242 - protein, 259 aa, Linum usitatissimum
MPNATSSSTSDHCPKPRASSGSSRKGCMRGKGGPENALCTYKGVRQRTWGKWVAEIREPNRGARLWLGTFDTSHDAALAYDAAARKLYGPDAKLNLPHFHNSPNNTNHNNIVPHVDVHVPLSLISSGGPTLSPSFTSSSSSNNGPTFTSNNADVGYRGFDLPLHGGDGGQWVDHYSSSDWKNTDSSAAAAAADASCNYNYKVGGNEVWSNLNANLPLMDDSIWVEAAMSLDYFQVAAMQDSNGWDTAALPPSNTTPWCI

SEQ ID NO: 243 - DNA, 1162 bp, Linum usitatissimum
cgcattcttcgattcctattcttcgatcaatcttctcatttcctcttcccccaatccgtaccacgcaaatccgacaagaaaaaaccaaccagccgtcaatggcgccttcaaaggagaaaaagccccttccccagatcaacaacggcggcggagaccggaaagagatgcatttccggggagtgaggaagcgcccgtggggccgttacgcggcggagatccgtgacccggggaagaagacccgggtctggcttggcacgtttgacactgcggaggaagccgccagagcttacgacaaagcggcgcgtgacttccgtggctccaaggccaagaccaacttcccatctcccaacgagatcgcttcttccaaacccggcggggtcaccgccgttgttgttccgactgccgacagcttcgtcaatcggcagagccccagccagagcagcaccgtggaatcgtctgatccaccggtggcgagtgagttgactcgccagatcgattttttcaggcctctgcctgttgccgccgccgcctccggcggtgtcggcagtgtcggcggcatggttggtaggtttccgtttgtgtaccagcagcagcagccgcaggggataatgactccggtgtggttcttcgacgggatggtgaagcctgagttcgtgacagctcagcggttcccggtccgattcgacccggtggattacaacggtggaagagcgcacagcgagtcggattcgacatcgtcggtggttttagactgcaagccgagcagcagcggaggaaacgggagagttctggatctggatctcaacctcgccccgccggcggaggcatgatcgccggccgttcatttcccgaaaaaataacttttttttaatcgggtgttttttcctattatctaatttttacccaactaattaagaaaaatttctgtaaggttggagagatcacaggaagaagaaaattacattaagtacatgatcgacgaaggagatctggaaattcaaagggttaattaatgtaaataagtcagtttttttgcaacccatcggagattaagaagactaagtttgctcttttgtctctttggttgtttctgttgtaaccttctgatgaaattcaaatattatatgagattttaatcttttccaaaaaaaaaaaaaaaaaa

SEQ ID NO: 244 - protein, 243 aa, Linum usitatissimum
MAPSKEKKPLPQINNGGGDRKEMHFRGVRKRPWGRYAAEIRDPGKKTRVWLGTFDTAEEAARAYDKAARDFRGSKAKTNFPSPNEIASSKPGGVTAVVVPTADSFVNRQSPSQSSTVESSDPPVASELTRQIDFFRPLPVAAAASGGVGSVGGMVGRFPFVYQQQQPQGIMTPVWFFDGMVKPEFVTAQRFPVRFDPVDYNGGRAHSESDSTSSVVLDCKPSSSGGNGRVLDLDLNLAPPAEA

SEQ ID NO: 245 - DNA, 975 bp, Triticum aestivum
aggaaaggaagaagaaagtgcgcaggagaagcactggtcctgattcggttgctgaaaccatcaagaagtggaaggaggaaaaccagaagctcctgcaagagaatggatcccggaaagcaccggccaagggttccaagaaagggtgcatggcagggaaaggaggtccagagaattcaaactgcgcttaccgcggtgtgaggcagaggacgtggggcaaatgggttgctgagatccgtgagcccaaccgtggcaaccggctgtggcttggttcattccctaccgcagtcgaagctgcacgtgcatatgatgatgcggcaagggcaatgtatggcgccaaagcacgtgtcaacttctcagagcagtccccagatgccagctctggttgcacgctggcacctccattgctgatgtctaatggggcaactgccgcatcacatccttctgatgggaaggatgagtctgagtctgcagggaccgtggcacataaggtgaaaaaagaagtgagcaatgatttgagaagtacccatgaggagcacaagaccctggaagtatcccaaccaaaagggaaggctttacataaagaagcgaatgtaagttatgattacttcaacgtcgaggaagttcttgacatgataattgtggaattgagtgctgatgtaaaaatggaagcacatgaagagtaccaagatggtgatgatgggtttagtcttttctcatattagggttttagctatgagggttgtagtcatgcggagcaatagggataactttcattctagctgctaggaaatacttcaaattatctgcaacccgaagctttgtagtcacttatggttttcatcttactggagagaatagctttataccataagtcaacgggtacaagaagttgtcctgtgcgttgagttcatgtactatggtaaaagttgagtccatatttaatgagcttactctgtcgaaaaaaaaaaaaaaaaa

SEQ ID NO: 246 - protein, 191 aa, Triticum aestivum
MAGKGGPENSNCAYRGVRQRTWGKWVAEIREPNRGNRLWLGSFPTAVEAARAYDDAARAMYGAKARVNFSEQSPDASSGCTLAPPLLMSNGATAASHPSDGKDESESAGTVAHKVKKEVSNDLRSTHEEHKTLEVSQPKGKALHKEANVSYDYFNVEEVLDMIIVELSADVKMEAHEEYQDGDDGFSLFSY

SEQ ID NO: 247 - DNA, 1334 bp, Triticum aestivum
tgcgtgtcgggcgatcctcaagggcctcaaggtccccgcgccggcgcggaaggtgacggcggctgtgctgtggcccgagaagaacaagcccaagcgggccgacggcggcgcccggcgcctcgcggggctcggccggcgtggggggctcgggctggacgacggcgaggcggacttcgaggccgacttcgaggagttcgaggccgactccggggactccggccaggagctcgggcgcggcggggtggctgagaaggacggcgacgacgaggtcgtcgagaccaagcccttcgccgccgtcaagaggtccctctcccaagatgacttaagcaccatgaccactgctggttttgatggtcctgcacaaaggtcagcaaaaaggaagagaaagaacgaattcaggggtatccgccagcgcccctggggtaagtgggctgctgaaatcagagatcctagcaagggtgtccgtgtttggcttggtaccttcaacagtgctgaagaagctgcaagagcttatgatgttgaagcacgaaggatccgtggcaagaaggccaaggttaactttccagaggaaccaacagttcctcagaagcgccgtgcttgccctgctgctcctaaagtttccaagtcaagcgcagcacaggaacctaccgtcataccagcagtcaacaaccttgccaacccaaatgctttcgtctacccgtctgctgactttgcatcaaagcagccacttgttcagcctgataacgtgccatttgttcctgcaattaactctgctgcacctgttgaagctcctgttatgaatatgtactctgaccagggaagcaactcctttggctgctctgacttgggctgggagtatgacaccaagactccagatatatcatccattgctcccatttctaccattgctgaaggagcagaaactgcacttctccagagtaacacctacaacccagcggtgattgctgaaggagctgaatctgcgcctgtccagaccaacacctacaactcagtggtgcctcctgtcatggagaacaatgctgttgattttgaaccttggatgaggtttcttttggatgatggcgtggatgagccgattgatagccttctgaattttgatgtgcctcaggatgtcgttggcaacatggacctttggagcttcgatgacatgcccatctgtggcgaaattttctgagggattcaaacccctgtacatcaggacaaagggaataagactatgggagattgggaagcaccccgttgtcacctttggttagaatatgcttatgtgcaagcttagatgcaaaaaagccgcatcctgagtctcttttgta

SEQ ID NO: 248 - protein, 287 aa, Triticum aestivum
MTTAGFDGPAQRSAKRKRKNEFRGIRQRPWGKWAAEIRDPSKGVRVWLGTFNSAEEAARAYDVEARRIRGKKAKVNFPEEPTVPQKRRACPAAPKVSKSSAAQEPTVIPAVNNLANPNAFVYPSADFASKQPLVQPDNVPFVPAINSAAPVEAPVMNMYSDQGSNSFGCSDLGWEYDTKTPDISSIAPISTIAEGAETALLQSNTYNPAVIAEGAESAPVQTNTYNSVVPPVMENNAVDFEPWMRFLLDDGVDEPIDSLLNFDVPQDVVGNMDLWSFDDMPICGEIF

SEQ ID NO: 249 - DNA, 1315 bp, Triticum aestivum
cgctccgcgaatcccaagagcgaactcagatcatctttggaccagacgcgcccacacaggacaagatgctgctgcttaatccggcgtccgaggcggcggcggcggcggcgctggacagcatccggcagcagctcctggaggagccggcgcggccggcgtactgccggagcgcgagcttcggcagcctggtggcggaccagtggagcgagtcgctcccgttccggcccaacgacgccgacgacatggtcgtctacggcgccctccgcgacgccttctcctgcggctggctccccgacggctccttcgcagccgtcaagcccgagcccctgccctcccccggttcctacgacggctcctgcctcggcagcttcctcgcgtcgccgcccgagctggacgcgccgtggacggaggaggaggccgaggtcgcggcgacggcgtcgagggggaagcacttcagaggcgtgaggcagcggccgtggggcaagttcgcggcggagatccgggacccggccaagaacggcgcgcgcgtgtggctcggcacgttcgacagcgccgaggacgccgcggtggcctacgaccgcgccgcctaccgcatgcgcggctcccgcgcgctcctcaacttcccgctccgcatcggctccgagatcgccgccgcagccgcagccgcgggccagaagcgtccgtctccgcagccggcgagccccgactctcctcctccctcctcaagcgcacccggctcgtcgaagcggagaaagagaggcgaggccgcggcagcgtccatggccatggctctggtgccgcccccgccggtgcaggctccggtccagctgaccctcccagcccagccgtggctcgccaccggcgccgtccagcagctagtgagctgaagcggcgaagcaaccactgatcgttctcatgaccgacggttattagttcttccttcatgtgttgaacccacggagaaacagagcatcaagatgagatcaatggcgcgtaatgcgtcgctcgaagaaaccttgatcagttggaggcaattacgcgccacgccgtcgtgaaatttgtgtggttccgtgtgaaacttgtcgctagagttagtggcgttggcacagtagcaagtgtgcgcagtggaattctggaagctggtttgtgagaggtggtgagagtgcaggtgcaaaacttgcacagaccttctcctctccaatggagaatcttctttgttcaaccgttgtttggtgctagcatcagtgagtggttcctttcaaatttgcaggtttcccattgatatatagtttaataacaaaaaaaaaaaaaaaaa

SEQ ID NO: 250 - protein, 273 aa, Triticum aestivum
MLLLNPASEAAAAAALDSIRQQLLEEPARPAYCRSASFGSLVADQWSESLPFRPNDADDMVVYGALRDAFSCGWLPDGSFAAVKPEPLPSPGSYDGSCLGSFLASPPELDAPWTEEEAEVAATASRGKHFRGVRQRPWGKFAAEIRDPAKNGARVWLGTFDSAEDAAVAYDRAAYRMRGSRALLNFPLRIGSEIAAAAAAAGQKRPSPQPASPDSPPPSSSAPGSSKRRKRGEAAAASMAMALVPPPPVQAPVQLTLPAQPWLATGAVQQLVS

SEQ ID NO: 251 - DNA, 1242 bp, Zea mays
gatttcgtcggatttggagctcggggaaggggctgacgacgacgtcatcgagatcaagcccttcgccgccaagagtactttctccagagatggcttaagcaccatgactactgctggttatgatgcccctgcagcaaggttggccaaaaggaagaggaagaatcaatacaggggtatccgccagcgcccttggggtaagtgggctgctgagatcagagatccccagaagggcgttcgtgtttggcttggtactttcaatagtccggaggaagctgcaagagcttatgatgctgaagcgcgcaggattcgtggcaagaaggccaaggttaactttcctgatgcaccagcagttggtcagaagtgccgttctagttcagcttctgctaaagcactcaagtcatgtgttgaacagaagccaattgtcaaaacagatatgaacatccttgccaacacaaatgcacccttctaccaatctgttaactacgcatccaacaatccatttgttccagcaatgaactctactgtttcttttgaggatcctatcatgaatctgcactctgaccagggaagtaactcccttggctgctcagacttgggctgggagaatgatactaagacaccagacatcacatccattgctcccattcccactattgctgaaggcgatgagtctgtatttgtcaactccaattcaaacagctcgatggtgcctcctgtcctggagaacaatgctgttgatctcactgatgggctgacagatttggaatcctatatgaggtttcttatggatggcggtgcaagtgattcaattgatagccttctgaaccttgatggatcacaggatcttggtagcaatatggacctctggaccttcgatgacatgcccatcgctggcgatttcttctgaggaatttgaagcttggccataggactatgtacatagggactagggaataaagactgggagattgggaagcacctgcttggcaccttggggtagcatatgctcgtgtctagctcagatgcagaagtcgcattctgaaactctttggttatcgacctgttccctattttaactatctctgtatgagagccatttatgagactgaaccattttaccattttgttttcccccttctttcgttgttacagtatatggtttaacattatgatttatggatatgtggccaaacatgccttttatatgcgctttgtgcttggtcgaaaaaaaaaaaaaaaaaa

SEQ ID NO: 252 - protein, 267 aa, Zea mays
MTTAGYDAPAARLAKRKRKNQYRGIRQRPWGKWAAEIRDPQKGVRVWLGTFNSPEEAARAYDAEARRIRGKKAKVNFPDAPAVGQKCRSSSASAKALKSCVEQKPIVKTDMNILANTNAPFYQSVNYASNNPFVPAMNSTVSFEDPIMNLHSDQGSNSLGCSDLGWENDTKTPDITSIAPIPTIAEGDESVFVNSNSNSSMVPPVLENNAVDLTDGLTDLESYMRFLMDGGASDSIDSLLNLDGSQDLGSNMDLWTFDDMPIAGDFF

SEQ ID NO: 253 - DNA, 1736 bp, Physcomitrella patens
atatcgctgttgggttgcgcaatgggggatcttcagaagcccctgcggccgaagaagcgcacgacctgggtggattgggcggttcagttccggtggatcctggttatccttgttgtgctccctgtttcgaagagctttgacactgttgcctggttccgggagcagtggtccgcttttaagtccgagaagaggcgtcagaaggagcatgacgagaatgtcgagaaggtgatcaaacgcttgaagtcgcgagatccctccaaggatggccttgtctgcaccgctcggaggccctggattgccgttggtatgcgcaatgtggactacaagcgggctcgccacttcgaagtcgaccttaatgatttcaatcaggtcttggagatcgacagggagaacatgatcgcccggtgcgagccattggtcaacatggggcagattacgcgaatgactgttcccatgggactttcccttgctgtcgtcgcagagctggacgacctgacagttggtggtctcatcaatggatatggaattgagggaagttctcacatctatggccttttcgccgacacttgtgtggcgtacgagatcatccttgctgatggacgccttgtgcgcgcaacagcaggcaacgagttctctgatttgttctacgccattccctggtctcagggtactctagggttgccggtggctgccgaaatcaaattgattgaagtcggtccgtacatgaaagtgacgtacaagcccgctagaggtgacctgcaggagctcgcccaggcctacaatgactcttacataccccgtgatggtgaccaagataatcccgagaaggtcccggatttcgttgagactatgatctacagcgagactgaaggagtgactatgactggccgatacgccagcaaggacgaagccaagcggaaagggaacaagatcaattgtcaaggttggtggtacaagaaatggttctaccagcatgcacaagaagccctgacgagaggagaatttgttgagtatatccccacaagagactactaccctcgtcatacccgctgcctctactgggagggcaagttaatcctgcccttcgccgatcagttctggttccggtacctgttcggttggatgatgccaccgaaggtttcattcttgaaggccacacagggagatgccatccggaactattaccatgagcgacatgtcattcaggacatgcttgtgccttcatacaaggtcggcatggctcttgaattcagtgaccgcgaattcgaggtgtatcctatttggctgtgccctcaccgtttattcaagcacccgatgagaacccagatcaatcctgagcctggatttgagtacgctggacgcccaggagacactccatatgctcagatgtacactgatgttggtgtatattatacacctagatgcgtgttcaagggggaggaattcgatggggtggctgccgtcaagaagatggaagcctggatgattgagaaccattgtttccaacctcagtacgcggtctctgagctcaacgagcgcgacttctggcgcatgtttgatcctaccctttaccagagatgccgggacaagtacaaagctgtcggcaccttcatgagcgtctactataagtgcaagaaggggaggaagacggagaaggaagtggctgaggaagaggctaaagtcacggagtctgcatatgctgacgtcgagaagcccgagtagagtgacgatatcgc

SEQ ID NO: 254 - protein, 566 aa, Physcomitrella patens
MGDLQKPLRPKKRTTWVDWAVQFRWILVILVVLPVSKSFDTVAWFREQWSAFKSEKRRQKEHDENVEKVIKRLKSRDPSKDGLVCTARRPWIAVGMRNVDYKRARHFEVDLNDFNQVLEIDRENMIARCEPLVNMGQITRMTVPMGLSLAVVAELDDLTVGGLINGYGIEGSSHIYGLFADTCVAYEIILADGRLVRATAGNEFSDLFYAIPWSQGTLGLPVAAEIKLIEVGPYMKVTYKPARGDLQELAQAYNDSYIPRDGDQDNPEKVPDFVETMIYSETEGVTMTGRYASKDEAKRKGNKINCQGWWYKKWFYQHAQEALTRGEFVEYIPTRDYYPRHTRCLYWEGKLILPFADQFWFRYLFGWMMPPKVSFLKATQGDAIRNYYHERHVIQDMLVPSYKVGMALEFSDREFEVYPIWLCPHRLFKHPMRTQINPEPGFEYAGRPGDTPYAQMYTDVGVYYTPRCVFKGEEFDGVAAVKKMEAWMIENHCFQPQYAVSELNERDFWRMFDPTLYQRCRDKYKAVGTFMSVYYKCKKGRKTEKEVAEEEAKVTESAYADVEKPE

SEQ ID NO: 255 - DNA, 603 bp, Physcomitrella patens
atcccgggtttgcgggtgaagcatcgacaaatctattttgggtctacccactcgccccgtcacctcgccggcgtcgtctgctgtgtgtctgcgccccggtagcttagattcatggcagcgattgacacggaaatggcgacggggccgaccggggagggctctagcgccggggtgagctcctccagtgctgtttccaagcgcccgaagcggttcgagattaagaagtggaatgctgtggctctttgggcgtgggacattgtggtggacaattgtgctatctgccgtaaccatatcatggacttgtgtattgagtgccaagcgaaccaagctagtgcgacgagtgaggagtgtactgtggcatggggtgtttgcaatcacgccttccatttccattgcatcagcagatggttgaagacgcgacaagtttgtccattagataacagcgaatgggaattccagaagtatggacgataaatgctttgggatttgtgttcctatttttgagtgctttatattcttctctcacagcttcagctgtttgtaaatttatcaagtctatgcactctacttgaagttgtgtagtcggtgaggattagttaaccg

SEQ ID NO: 256 - protein, 120 aa, Physcomitrella patens
MAAIDTEMATGPTGEGSSAGVSSSSAVSKRPKRFEIKKWNAVALWAWDIVVDNCAICRNHIMDLCIECQANQASATSEECTVAWGVCNHAFHFHCISRWLKTRQVCPLDNSEWEFQKYGR

SEQ ID NO: 257 - DNA, 1290 bp, Physcomitrella patens
acccgggtgtggagtggtagcggtggtgatatttcgagcgccatgtcagacttggatcgccaaatcgagcagctgaagcgctgcgaacctctgaaggagtctgaagtgaaggcgctatgtctcaaggctatggagattttggttgaggagagcaatgtgcagcgagtggacgcgcctgtgactatttgcggtgacattcatggccagttttatgatttgaaagagctcttcaaagtaggaggagattgtcccaagacaaattatttgtttctgggggactttgttgacagaggattttattcagttgagactttcttgttattgcttgctcttaaggtgaggtatcccgatcgtataactttgattcgagggaatcacgaaagtcgtcagattactcaggtgtatggtttttacgatgagtgcctgaggaaatatggttctataaatgtctggcgatattgcacggacatatttgactatttgagtctctcagcactcatcgacaatcgaatcttttgcgttcatggtggattgtctccttccattacgaccgttgatcagattcgaactattgatcgaaagcaagaggtacctcatgacggtgcaatgtgtgatctattgtggtcagatcccgaagagatagaaggttggggacttagcccacggggtgctggttatttatttggcggaaacgtagctactacatttaatcacacgaataaaattgataatatctgtcgagcgcatcaattggtcatggagggatacaaatggatgttcaacaaccaggttgtcacagtatggtcagctccaaactactgctacagatgtggtaacgttgcagcaatcctagagttggatgagaatctgaacagaaaattcactgtgtttgaagcggctccccctgaagccagaggggtaccatcaaagaagcctgtgccggattattttttataaagcttctcggaacccgatgcttgtaagatttaaacgatgttacaattatctacttgacagttttctcgacgttgtaaactggtttctggaagattatagacatactacaagggttgtagtcaagagagttgtggtataagcacgtacttatactgaccactgtgcgcagtactcatgtacttcccagcctccctacaggtcgaagctatttgctccagaaattagaacagttcgttcgtacgatatttatagcatacaggagaggggatacagtggctacttttatgaacatattgctctagtttgagcttcagggagatacgaggttaacgc

SEQ ID NO: 258 - protein, 304 aa, Physcomitrella patens
MSDLDRQIEQLKRCEPLKESEVKALCLKAMEILVEESNVQRVDAPVTICGDIHGQFYDLKELFKVGGDCPKTNYLFLGDFVDRGFYSVETFLLLLALKVRYPDRITLIRGNHESRQITQVYGFYDECLRKYGSINVWRYCTDIFDYLSLSALIDNRIFCVHGGLSPSITTVDQIRTIDRKQEVPHDGAMCDLLWSDPEEIEGWGLSPRGAGYLFGGNVATTFNHTNKIDNICRAHQLVMEGYKWMFNNQVVTVWSAPNYCYRCGNVAAILELDENLNRKFTVFEAAPPEARGVPSKKPVPDYFL

SEQ ID NO: 259 - DNA, 912 bp, Brassica napus
atggatttggatcaatggatttcgaaggttaaagacggcgagcatctctccgaagacgagcttcagcttctctgcgaatacgtgaaagaaattctgattgaggagtccaacgttcagcctgtcaacagtccagtcaccgtctgtggtgacatccatggccagtttcatgatctcatgaagctttttcagaccgggggtcatgttcccgacacaaactacatatttatgggggactttgtggatagaggttacaacagccttgaagtcttcactattcttttgcttcttaaagctagacatccagccaatattacacttctgcgtggaaatcatgaaagtaggcagctaacgcaggtatatggtttctatgacgaatgccaaaggaagtatggtaacgccaatgcgtggcgctattgcacagatgtttttgactatcttaccttatcagctataatagatggcacggttctatgtgttcatggcggcctttccccggatgtccggacaattgatcagataagactagtagatcgaaactgtgaaattccccatgaagggcccttttgcgatcttatgtggagcgatcctgaagacattgaaacatgggctgttagtccacgtggagctggttggcttttcggatcgagggttaccactgagtttaaccatataaacaagcttgatctagtatgccgtgcacaccagctggtacaagaaggtcttaagtacatgttccaagataaaagccttgtaacggtatggtctgcgcctaattactgctatcgctgtgggaatgtagcttctatattgagtttcgatgacaacatggaaaaatcagtgaagtacttcacagagacggaagagaacaatcaaatgagagggccaaggactggagttccatatttcctatga

SEQ ID NO: 260 - protein, 303 aa, Brassica napus
MDLDQWISKVKDGEHLSEDELQLLCEYVKEILIEESNVQPVNSPVTVCGDIHGQFHDLMKLFQTGGHVPDTNYIFMGDFVDRGYNSLEVFTILLLLKARHPANITLLRGNHESRQLTQVYGFYDECQRKYGNANAWRYCTDVFDYLTLSAIIDGTVLCVHGGLSPDVRTIDQIRLVDRNCEIPHEGPFCDLMWSDPEDIETWAVSPRGAGWLFGSRVTTEFNHINKLDLVCRAHQLVQEGLKYMFQDKSLVTVWSAPNYCYRCGNVASILSFDDNMEKSVKYFTETEENNQMRGPRTGVPYFL

SEQ ID NO: 261 - DNA, 918 bp, Brassica napus
atgtcagacctagacaggcagatagagcagctgaagcgctgcgaaccgttgagcgaatcggaggtgaagtctctctgcctcaaagccatggagatcctcgttgaagagagtaatgttcagagagtcgatgctcccgtcactctatgtggtgatatccatgggcagttctatgacatgatggagcttttcaaagttggaggtgattgccccaagaccaactacttgtttcttggtgattttgttgatcgtggatactactctgttgagacctttctacttctgctcgccctcaaggttagatatccagaccgtataactctcatcagaggaaaccacgagagcaggcaaatcacacaggtttatggattttatgatgagtgtttgcgtaaatatggctctgttaatgtctggagatactgcaccgacattttcgactacatgagtctttcagctgttgttgagaacaagatattctgtgttcatggcggtctctctccagctatcattactcttgatcagatcaggacaattgaccggaagcaagaagtgccacatgatggtgccatgtgtgacctcctatggtctgatcctgaagatattgttgatggctggggattgagtcctcgtggtgctggcttcctttttggcggcagtgttgtctcctcttttaaccacacaaacaacatagactacatagcccgagcccatcagcttgttatggagggttacaaatggatgttcgatagccagattgtgacagtctggtcagccccaaattactgttacaggtgcggtaatgtggcttcgattctagagctcgatgagaatctaaacaaagagttccgtgtgttcgaggcagcgcagcaggactcgagagggcctcccgctaaaaaacctgcccctgattacttcctataa

SEQ ID NO: 262 - protein, 305 aa, Brassica napus
MSDLDRQIEQLKRCEPLSESEVKSLCLKAMEILVEESNVQRVDAPVTLCGDIHGQFYDMMELFKVGGDCPKTNYLFLGDFVDRGYYSVETFLLLLALKVRYPDRITLIRGNHESRQITQVYGFYDECLRKYGSVNVWRYCTDIFDYMSLSAVVENKIFCVHGGLSPAIITLDQIRTIDRKQEVPHDGAMCDLLWSDPEDIVDGWGLSPRGAGFLFGGSVVSSFNHTNNIDYIARAHQLVMEGYKWMFDSQIVTVWSAPNYCYRCGNVASILELDENLNKEFRVFEAAQQDSRGPPAKKPAPDYFL

SEQ ID NO: 263 - DNA, 942 bp, Brassica napus
atgggggcgaattcaataccgacggacgcaacgattggtctcgatgagcagatctcgcagctcatgcagtgcaagcctctctccgagcaacaggttagagcgttatgcgaaaaagccaaggagatcttaatggatgaaagcaacgttcagcctgtgaaaagccctgtgacaatctgcggtgatattcatggacagttccatgatcttgctgagcttttccgtattggcggaatgtgccctgacaccaattacctgtttatgggagattacgttgaccgtggttattattctgttgaaactgttacgctgttagtcgccttaaagctgcgataccctcagcgaatcaccattcttagaggaaaccatgaaagtcgtcagatcactcaggtttatggattttatgatgaatgtctacgaaagtatggcaatgcaaatgtttggaaaatctttacagacctctttgactatttcccactgacagccttggttgagtcagaaatattttgccttcatggtggattgtctccatctatcgagacacttgacaacataaggaactttgatcgagttcaagaagtgccccatgaagggcccatgtgtgacttattatggtctgatcctgatgaccgttgtggttggggcatctctcctcgtggtgctggatatacatttggtcaggacatatccgaacagttcaaccactcaaacagcttaaagctgatcgccagagcccatcagctggttatggatggatacaactgggctcatgagcaaaaggtggtaactatcttcagtgcaccaaactattgttaccgttgtgggaacatggcttcgattcttgaggttgatgactgcaggaaccacaccttcattcagtttgaaccagcaccaaggagaggagaaccagatgttactcggagaacaccagactatttcctgtga

SEQ ID NO: 264 - protein, 313 aa, Brassica napus
MGANSIPTDATIGLDEQISQLMQCKPLSEQQVRALCEKAKEILMDESNVQPVKSPVTICGDIHGQFHDLAELFRIGGMCPDTNYLFMGDYVDRGYYSVETVTLLVALKLRYPQRITILRGNHESRQITQVYGFYDECLRKYGNANVWKIFTDLFDYFPLTALVESEIFCLHGGLSPSIETLDNIRNFDRVQEVPHEGPMCDLLWSDPDDRCGWGISPRGAGYTFGQDISEQFNHSNSLKLIARAHQLVMDGYNWAHEQKVVTIFSAPNYCYRCGNMASILEVDDCRNHTFIQFEPAPRRGEPDVTRRTPDYFL

SEQ ID NO: 265 - DNA, 921 bp, Brassica napus
atgccgccgaacggagatctagaccgtcagatctcccagctgatggagtgtaaaccgctatctgaggccgatgtgaagacgctctgcgatcaagcgagggccatcctcgtcgaggagtggaacgttcagcccgtgaagtgtcctgtcaccgtctgcggcgatatccacggacagttctatgaccttatcgagctctttcgaatcggtgggaatcctccggatactaactacctcttcatgggagactatgtagaccgtggctactattcagtagaaacagtttctctattggtggcactgaaagtgcgatacagggataggattacaatcttgcgagggaatcacgagagtcggcagattactcaagtctatgggttttatgatgaatgtttgaggaagtatggaaatgcaaatgtctggaagtttttcacggaccttttcgattatcttcctcttactgctctcatagagagtcaggttttctgcttgcatggagggctttcaccttctctggacacccttgataatatccgaagcttggatcgtatacaagaggttccacatgaaggaccaatgtgtgatttattatggtctgatcccgatgatcgatgtgggtggggaatatctccacgaggtgctggttatacatttggacaagacatcgcaactcagtttaatcacaacaatggactcagtctcatatcaagagcacatcaacttgtcatggaaggctttaactggtgtcaggacaaaaatgttgtgacggtgtttagtgcaccaaactattgctaccggtgtggaaacatggcagctattctagagataggagagaacatggaccagaacttcctccagttcgatccagctcctcgtcaagtcgaaccagatactacccgcaagacccctgattattttttgtga

SEQ ID NO: 266 - protein, 306 aa, Brassica napus
MPPNGDLDRQISQLMECKPLSEADVKTLCDQARAILVEEWNVQPVKCPVTVCGDIHGQFYDLIELFRIGGNPPDTNYLFMGDYVDRGYYSVETVSLLVALKVRYRDRITILRGNHESRQITQVYGFYDECLRKYGNANVWKFFTDLFDYLPLTALIESQVFCLHGGLSPSLDTLDNIRSLDRIQEVPHEGPMCDLLWSDPDDRCGWGISPRGAGYTFGQDIATQFNHNNGLSLISRAHQLVMEGFNWCQDKNVVTVFSAPNYCYRCGNMAAILEIGENMDQNFLQFDPAPRQVEPDTTRKTPDYFL

SEQ ID NO: 267 - DNA, 921 bp, Brassica napus
atgccgccgaacggagatctagaccgtcagatcgagcatctgatggagtgcaaacctttatcggaggaggatgtgaggacgctctgcgatcaagctaaggccatcctcgtcgaggaatggaacgtccagcccgtgaaatgccccgtcaccgtctgcggcgatatccacggccagttctatgaccttatcgagcttttccgaatcggtggtaacgcccccgatacgaattacctcttcatgggtgactatgtagaccgtggctactattcagtggaaacggtttctttattggtggcattgaaagtcagatacagggataggattacaatcttgcgagggaaccacgagagtcgtcagatcacccaagtatatggtttttatgacgagtgcttgaggaagtacggaaacgcaaatgtgtggaagtatttcacagaccttttcgattatcttcctcttactgctcttatcgagagtcaggttttctgtttgcatggagggctatcaccttctctggatacacttgataatatccgaagcttggatcgtatacaagaggttccacacgaaggaccaatgtgtgatttactatggtctgatccagatgatcgatgcgggtggggaatatctccaagaggtgctggttatacatttggacaggatatagcaactcagtttaatcacaacaatggactcagtctcatatcaagagcgcatcagcttgtcatggaaggttttaactggtgtcaggataagaatgtggtgacggtgtttagtgcaccaaactattgctaccggtgtggaaacatggcagcgattctagagataagtgagaacatggagcagaacttccttcagtttgatccagctccaagacaagtcgaacctgatactacccgtaagacccctgattattttttgtga

SEQ ID NO: 268 - protein, 306 aa, Brassica napus
MPPNGDLDRQIEHLMECKPLSEEDVRTLCDQAKAILVEEWNVQPVKCPVTVCGDIHGQFYDLIELFRIGGNAPDTNYLFMGDYVDRGYYSVETVSLLVALKVRYRDRITILRGNHESRQITQVYGFYDECLRKYGNANVWKYFTDLFDYLPLTALIESQVFCLHGGLSPSLDTLDNIRSLDRIQEVPHEGPMCDLLWSDPDDRCGWGISPRGAGYTFGQDIATQFNHNNGLSLISRAHQLVMEGFNWCQDKNVVTVFSAPNYCYRCGNMAAILEISENMEQNFLQFDPAPRQVEPDTTRKTPDYFL

SEQ ID NO: 269 - DNA, 927 bp, Glycine max
atgtcatcatcttcagacctggacaggcaaatagagcagttgaagaggtgtgagcctcttaaggagtctgaagtgaaggtgctctgcctcaaagccatggaaatccttgtcgaagagagcaacgttcaaagggtcgacgctcctgtcaccatatgtggtgatattcacggtcagttttatgacatgaaggagcttttcaaagtaggaggggattgccccaaaactaactatttattcctgggggattttgttgatagagggttttactcggttgaaacgtttctgcttctgctcgctcttaaggtgaggtatccggatcggataacactcattaggggaaaccatgaaagccgtcagatcacccaggtgtatggattctatgatgagtgccttcgaaaatatggttcagtcaatgtctggagatattgtaccgatatattcgactacttaagcttgtccgctctaattgaaaacaagattttcagtgttcatggtggtctttctcctgccatttcaacactggatcagatacgaactattgatcggaagcaagaagtacctcatgatggtgccatgtgtgaccttctatggtcagatcctgaagatattgtggatagctggggtcttagtccccgtggtgctggttacttatttggtggcagtgttgttacttcctttaaccactccaataacattgactatatatgtcgtgcacatcagttggtaatggaaggatataaatggatgttcaataaccagatagttactgtctggtcagctccaaattattgctacagatgtggcaatgtagctgcaattctggagttggatggaaatcttactaagcaattccgggtgtttgaagctgctccacaggaatcaagaggaacacctgctaagaaaccagcaccagattactttttatga

SEQ ID NO: 270 - protein, 308 aa, Glycine max
MSSSSDLDRQIEQLKRCEPLKESEVKVLCLKAMEILVEESNVQRVDAPVTICGDIHGQFYDMKELFKVGGDCPKTNYLFLGDFVDRGFYSVETFLLLLALKVRYPDRITLIRGNHESRQITQVYGFYDECLRKYGSVNVWRYCTDIFDYLSLSALIENKIFSVHGGLSPAISTLDQIRTIDRKQEVPHDGAMCDLLWSDPEDIVDSWGLSPRGAGYLFGGSVVTSFNHSNNIDYICRAHQLVMEGYKWMFNNQIVTVWSAPNYCYRCGNVAAILELDGNLTKQFRVFEAAPQESRGTPAKKPAPDYFL

SEQ ID NO: 271 - DNA, 945 bp, Glycine max
atgggcgccaattcgttgccatcggcggaatcaaacttcgatctcgacgagcagatctcgcagctcatgcaatgcaagccactttccgagcaccaggttagagttttatgtgagaaggctaaggagattttgatggaagaaagtaatgtccagcctgtgaaaagccctgtgacaatttgtggtgatattcatgggcagtttcatgaccttgctgaactatttcgaattggagggaagtgtccagatactaattacttgtttatgggtgattatgtggaccggggttattattcagttgaaactgtaacacttcttgtgtcactgaaagtgcgatatcctcagcgaattactattcttagaggaaaccatgaaagccgtcagatcactcaagtatacggattttacgatgaatgcctcagaaaatatggtaatgctagtgtttggaagatctttacagaccttttcgatttctttccattgactgcattggttgagtctgaaatattttgtttgcatggtgggctttcaccttcaattgagactcttgataacataaggaacttcgatcgtgttcaagaggttcctcatgaagggcccatgtgcgatctgttgtggtctgatccagatgataggtgtggctggggaatttctcctcgtggtgctggatatacatttggccaggatatatccgaacaatttaatcacacaaacaagcttaagttaattgctagagctcatcagctggttatggatggatttaactgggctcatgaacaaaaggtggttaccatttttagtgcacctaactactgttatcgatgtgggaacatggcctccattttggaggttgatgattccatgggccacacatttatccagtttgatcctgctcccaggagaggagaacctgatgtcacccgtagaacgcctgattacttcttatga

SEQ ID NO: 272 - protein, 314 aa, Glycine max
MGANSLPSAESNFDLDEQISQLMQCKPLSEHQVRVLCEKAKEILMEESNVQPVKSPVTICGDIHGQFHDLAELFRIGGKCPDTNYLFMGDYVDRGYYSVETVTLLVSLKVRYPQRITILRGNHESRQITQVYGFYDECLRKYGNASVWKIFTDLFDFFPLTALVESEIFCLHGGLSPSIETLDNIRNFDRVQEVPHEGPMCDLLWSDPDDRCGWGISPRGAGYTFGQDISEQFNHTNKLKLIARAHQLVMDGFNWAHEQKVVTIFSAPNYCYRCGNMASILEVDDSMGHTFIQFDPAPRRGEPDVTRRTPDYFL

SEQ ID NO: 273 - DNA, 921 bp, Glycine max
atgccgtctcacgcggatctggaccggcagatcgagcatctgatggagtgcaagcctctgccggaggccgaggtgaaggcgctgtgcgatcaggcgagggcgattctcgtcgaagagtggaacgttcagccggtgaagtgccccgtcaccgtctgcggcgacattcacggccagttctacgatctcatcgagctctttcggataggaggaaacgctcccgatactaattacctctttatgggcgattatgtagatcgtgggtactattcagtggagactgtcacgcttttggtggccttgaaagttcgttatagagatagaattacaatccttaggggaaatcatgagagccgtcaaatcactcaagtgtatggcttctacgatgaatgcttgagaaagtatggaaatgccaatgtctggaaattctttaccgatttgtttgattatttacctctgaccgcccttattgagagtcagattttctgtttgcatggaggtctctcaccatctttggatacacttgataatatccgtgccttggatcgcatacaggaggttccacacgaaggaccaatgtgtgacctcttgtggtctgatccagatgatcgctgtggttggggaatatctccacgtggtgctggatatacatttggacaggatatagctgctcagttcaatcataccaatggtctatcgctgatatctagagctcaccaacttgtaatggaaggattcaattggtgccaggacaagaatgtggtgactgtttttagtgcacctaattactgttaccgatgtgggaacatggctgccatactggaaattggagagaacatggatcagaattttctgcagtttgatccagctcccagacaaattgagcccgacactacacgaaagacgccagattattttttgtaa

SEQ ID NO: 274 - protein, 306 aa, Glycine max
MPSHADLDRQIEHLMECKPLPEAEVKALCDQARAILVEEWNVQPVKCPVTVCGDIHGQFYDLIELFRIGGNAPDTNYLFMGDYVDRGYYSVETVTLLVALKVRYRDRITILRGNHESRQITQVYGFYDECLRKYGNANVWKFFTDLFDYLPLTALIESQIFCLHGGLSPSLDTLDNIRALDRIQEVPHEGPMCDLLWSDPDDRCGWGISPRGAGYTFGQDIAAQFNHTNGLSLISRAHQLVMEGFNWCQDKNVVTVFSAPNYCYRCGNMAAILEIGENMDQNFLQFDPAPRQIEPDTTRKTPDYFL

SEQ ID NO: 275 - DNA, 942 bp, Helianthus annuus
atgagcttcgattcggtcccttccagcacccatggcaaccttgacgagcagattagtcagcttatgcagtgcaagcccttatccgaacaagatgttcgggggctatgtgaaaaggcaaaggaaattctgatggacgaaagcaatgtccagcccgtgaaaagcccggttacaatctgtggtgacatccatggacaattccatgatcttgcagagctatttcgcattggaggaaagtgcccggatacaaattacttgttcatgggagactatgtggatcgtgggtactactctgttgaaactgtgacactgctggtttccttgaaagtacgttatcctcaaagaattaccattttaagaggaaaccatgagagtcgtcagattactcaagtttatggattttacgatgagtgcctgaggaagtatgggaatgcaaatgtgtggaagatctttacagatctttttgattattttccgctcacagcactggtcgagtccgagattttttgtcttcatggtggtttgtccccttccattgaaacattggacaacattcggaactttgaccgcgtgcaagaagttccgcacgagggtcccatgtgtgatcttttgtggtccgaccctgatgaccgatgtggttggggtatttcacctcggggagcagggtatacctttggtcaggatatttctgagcagttcaaccatactaacaacctaaagctgattgcaagagctcatcagctggtcatggaaggctacaactggggtcatgatcaaaaggtggttaccatattcagtgcaccaaattattgctaccgctgtggaaacatggcgtctattttggaagttgacgattgcaagggtcatacgttcatccagttcgagccggctcctagaaggggagaacccgacgtaaccaggagaacgcctgattacttcctatga

SEQ ID NO: 276 - protein, 313 aa, Helianthus annuus
MSSDPVMQGVNHNVDEYISQLMQCKPLSEPEVKSLCDKAKEILMQESNVQPVKSPVTICGDIHGQFHDLAELFRIGGKCPDTNYLFMGDYVDRGYYSVETVSLLVALKVRYPQRLTILRGNHESRQITQVYGFYDECLRKYGTANVWKTFTDLFDYLPLTALVESEIFCLHGGLSPSIETLDNIRNFDRVQEVPHEGPMCDLLWSDPDDRCGWGISPRGAGYTFGQDISEQYNHTNGLKLIARAHQLVMEGFNWGHERKVVTIFSAPNYCYRCGNMASILEVDDCKGHTFIQFEPAPRRGEPDVTRRTPDYFL

SEQ ID NO: 277 - DNA, 918 bp, Linum usitatissimum
atgtcagacctagataggcagattgagcagcttaagaagtgcgagcctttgaaagaatcggaagtcaaggctctgtgcttgaaagctatggagattctcgtcgaagagagcaacgttcagcgcgtggacgcccctgtcactatatgtggagacattcatggacagttctatgacctgaaggagcttttcaaagtaggaggagattgcccaaaaactaattacttatttcttggagattttgttgatagaggattctactcggttgagacatttttgcttctgcttgcccttaaggtgcgatatccagatagaataactctcatcagaggaaatcatgagagccgtcagataacacaggtgtatggtttctatgatgagtgcctacgaaaatacggctctgttaatgtttggagatattgcactgacatatttgattacctaagtttgtcagccctcattgagaacaaagttttcagtgtccacggtggcctttctcctgcgatatcaaccttggatcagatccgaaccattgatcgaaagcaagaagtgcctcatgatggtgccatgtgtgacctaatgtggtcagatcctgaagatattgtggatggttggggtttgagcccacgtggtgcagggttcctgtttggtggcagcgtggttagttctttcaaccactcaaataatatagactacatttgtcgcgctcatcagttggttatggaagggtacaaatggatgtttaatgatcaaatcgttactgtttggtcggctccaaactactgttacagatgtggtaatgtcgctgcaatccttgagctggatgagaacctcaacaaacaatttcgtgtgtttgatgctgcccctcaggaatcaagaggagcacctgcgaaaaaggcagcccctgattactttttatga

SEQ ID NO: 278 - protein, 305 aa, Linum usitatissimum
MSDLDRQIEQLKKCEPLKESEVKALCLKAMEILVEESNVQRVDAPVTICGDIHGQFYDLKELFKVGGDCPKTNYLFLGDFVDRGFYSVETFLLLLALKVRYPDRITLIRGNHESRQITQVYGFYDECLRKYGSVNVWRYCTDIFDYLSLSALIENKVFSVHGGLSPAISTLDQIRTIDRKQEVPHDGAMCDLMWSDPEDIVDGWGLSPRGAGFLFGGSVVSSFNHSNNIDYICRAHQLVMEGYKWMFNDQIVTVWSAPNYCYRCGNVAAILELDENLNKQFRVFDAAPQESRGAPAKKAAPDYFL

SEQ ID NO: 279 - DNA, 912 bp, Linum usitatissimum
atggatttggatcagtggattgcaaaggtgaaggaagggcagcatctcctggaagacgagctccagctcctgtgcgaatatgtaaaagagatcctaatcgaggaatccaatgtccagcctgttaacagtcctgtgactgtttgtggagatatacatggtcagtttcatgatctaatgaaacttttccagaccggaggtcatgttccagagactaattatatatttatgggggactttgtggaccgaggttataatagtcttgaagttttctctatacttttacttcttaaagcgaggtatccagctcatattacgcttttgcgtgggaatcatgagagccgtcagctaactcaggtttatggtttctatgacgagtgccaacggaagtatgggaataccaatgcatggcgctactgtacagatgttttcgattatctaacgctttcagctattatagatggcactgtgctttgtgttcacggtggtctttctcctgatgttcgaacaattgatcagataagagtaattgatcggaactgtgaaattcctcatgaaggaccattctgtgatcttatgtggagtgatccggaagagatagagacatgggcggttagccccagaggagcaggttggctttttggatcaagggtcacttctgagtttaaccacattaacaacctcgacctggtttgtcgggcgcaccaacttgtacaagaaggcctcaagtacatgtttcaagataaaggtttagtaactgtgtggtctgcaccgaactactgttaccgatgtggtaatgtggcttctatcctaagcttcaatgagaatatggagagagaagtgaagttcttcaccgaaacggaggagaacaatcagatgagaggaccaaggactggagttccttatttcttatga

SEQ ID NO: 280 - protein, 303 aa, Linum usitatissimum
MDLDQWIAKVKEGQHLLEDELQLLCEYVKEILIEESNVQPVNSPVTVCGDIHGQFHDLMKLFQTGGHVPETNYIFMGDFVDRGYNSLEVFSILLLLKARYPAHITLLRGNHESRQLTQVYGFYDECQRKYGNTNAWRYCTDVFDYLTLSAIIDGTVLCVHGGLSPDVRTIDQIRVIDRNCEIPHEGPFCDLMWSDPEEIETWAVSPRGAGWLFGSRVTSEFNHINNLDLVCRAHQLVQEGLKYMFQDKGLVTVWSAPNYCYRCGNVASILSFNENMEREVKFFTETEENNQMRGPRTGVPYFL

SEQ ID NO: 281 - DNA, 942 bp, Linum usitatissimum
atgagcttcgattcggtcccttccagcacccatggcaaccttgacgagcagattagtcagcttatgcagtgcaagcccttatccgaacaagatgttcgggggctatgtgaaaaggcaaaggaaattctgatggacgaaagcaatgtccagcccgtgaaaagcccggttacaatctgtggtgacatccatggacaattccatgatcttgcagagctatttcgcattggaggaaagtgcccggatacaaattacttgttcatgggagactatgtggatcgtgggtactactctgttgaaactgtgacactgctggtttccttgaaagtacgttatcctcaaagaattaccattttaagaggaaaccatgagagtcgtcagattactcaagtttatggattttacgatgagtgcctgaggaagtatgggaatgcaaatgtgtggaagatctttacagatctttttgattattttccgctcacagcactggtcgagtccgagattttttgtcttcatggtggtttgtccccttccattgaaacattggacaacattcggaactttgaccgcgtgcaagaagttccgcacgagggtcccatgtgtgatcttttgtggtccgaccctgatgaccgatgtggttggggtatttcacctcggggagcagggtatacctttggtcaggatatttctgagcagttcaaccatactaacaacctaaagctgattgcaagagctcatcagctggtcatggaaggctacaactggggtcatgatcaaaaggtggttaccatattcagtgcaccaaattattgctaccgctgtggaaacatggcgtctattttggaagttgacgattgcaagggtcatacgttcatccagttcgagccggctcctagaaggggagaacccgacgtaaccaggagaacgcctgattacttcctataa

SEQ ID NO: 282 - protein, 313 aa, Linum usitatissimum
MSFDSVPSSTHGNLDEQISQLMQCKPLSEQDVRGLCEKAKEILMDESNVQPVKSPVTICGDIHGQFHDLAELFRIGGKCPDTNYLFMGDYVDRGYYSVETVTLLVSLKVRYPQRITILRGNHESRQITQVYGFYDECLRKYGNANVWKIFTDLFDYFPLTALVESEIFCLHGGLSPSIETLDNIRNFDRVQEVPHEGPMCDLLWSDPDDRCGWGISPRGAGYTFGQDISEQFNHTNNLKLIARAHQLVMEGYNWGHDQKVVTIFSAPNYCYRCGNMASILEVDDCKGHTFIQFEPAPRRGEPDVTRRTPDYFL

SEQ ID NO: 283 - DNA, 924 bp, Triticum aestivum
atgagcagcccccatggcggcctcgacgaccagatcgagcgcctcatgcagtgcaagcccctccccgaggccgaggttagagcactgtgcgagaaggccaaggagattttgatggaggagagcaatgttcagcctgtaaggagtcctgttacaatctgtggtgatattcatgggcagtttcacgatcttgcggaactgttccgaattggtggaaagtgtccggatacaaattacttgtttatgggagattatgtagatcgtggctactattctgtcgaaactgtcacgctgttggtgtccttgaaagttcgttatcctcagcgaatcaccattcttagaggaaaccatgaaagccgacagatcactcaagtttatggattctatgacgagtgcttaaggaagtatggaaatgcaactgtgtggaaaacctttacggatctgtttgactacttccccttgacagcattggtcgagtcagaaatattttgcttgcatggtggattatcaccatccattgagacacttgataacatacgtaactttgaccgcacccaagaagttcctcatgaagggcccatgtgtgatcttctgtggtctgaccccgatgatcgatgcggttggggtatttctcctcgaggcgctggatataccttcggacaggatatatcagagcagttcaatcataccaataacttacgacttattgctagagctcaccagttggtgatggagggattcaactgggctcatgagcaaaaagtggtcaccatatttagtgcacctaattattgctaccgctgtggaaacatggcatcaatcttggaagttgatgattgccgggagcatactttcatccagttcgagccggccccgagaaggggagaaccagacgtaactcgtagaacgccagactacttcctgtga

SEQ ID NO: 284 - protein, 307 aa, Triticum aestivum
MSSPHGGLDDQIERLMQCKPLPEAEVRALCEKAKEILMEESNVQPVRSPVTICGDIHGQFHDLAELFRIGGKCPDTNYLFMGDYVDRGYYSVETVTLLVSLKVRYPQRITILRGNHESRQITQVYGFYDECLRKYGNATVWKTFTDLFDYFPLTALVESEIFCLHGGLSPSIETLDNIRNFDRTQEVPHEGPMCDLLWSDPDDRCGWGISPRGAGYTFGQDISEQFNHTNNLRLIARAHQLVMEGFNWAHEQKVVTIFSAPNYCYRCGNMASILEVDDCREHTFIQFEPAPRRGEPDVTRRTPDYFL

SEQ ID NO: 285 - DNA, 921 bp, Zea mays
atgccgtcgcacggggatctggaccggcagatcgcgcagctgcgcgactgcaagtacctgcccgaggcggaggtcaaggtgctctgcgagcaggccaaggccatcctcatggaggaatggaacgtgcagcccgtgcgctgccccgtcaccgtctgcggcgacatccacggccagttctatgacctcatcgagctcttccgcatcggcggcgactctcccgacaccaactacctcttcatgggcgactacgtcgatcgtggctattattcagttgaaacggtttctctgttagtggctttgaaagtccgttacagagatagaattacaatacttcgaggaaatcatgagagcagacaaatcactcaagtgtacggcttctatgatgaatgcttaagaaaatatggaaatgcaaatgtatggaagtattttacagacttgtttgattatttgcctctcacagctcttatagaaaatcaggtcttctgtcttcatggaggcctctctccgtcattggacacattggataacattcgttctcttgatcgcatacaggaggtacctcatgaaggacccatgtgtgatcttttgtggtctgacccagatgaccgatgtgggtggggaatttcacccagaggagcaggttacacatttgggcaagacattgcacagcagttcaaccatacaaatggtctctctctcatttcaagggcccatcaacttgtaatggaaggatttaattggtgccaggataagaatgtagtcacagtcttcagtgcgcctaattactgttaccgctgtggtaacatggctgctattcttgaaatcggggaaaacatggaccagaacttccttcaattcaaccccgcacctcggcaaattgagccagacacaactcgcaaaaccccagactactttctgtaa

SEQ ID NO: 286 - protein, 306 aa, Zea mays
MPSHGDLDRQIAQLRDCKYLPEAEVKVLCEQAKAILMEEWNVQPVRCPVTVCGDIHGQFYDLIELFRIGGDSPDTNYLFMGDYVDRGYYSVETVSLLVALKVRYRDRITILRGNHESRQITQVYGFYDECLRKYGNANVWKYFTDLFDYLPLTALIENQVFCLHGGLSPSLDTLDNIRSLDRIQEVPHEGPMCDLLWSDPDDRCGWGISPRGAGYTFGQDIAQQFNHTNGLSLISRAHQLVMEGFNWCQDKNVVTVFSAPNYCYRCGNMAAILEIGENMDQNFLQFNPAPRQIEPDTTRKTPDYFL

SEQ ID NO: 287 - DNA, 1686 bp, Escherichia coli
atgaagaaggtttggcttaaccgttatcccgcggacgttccgacggagatcaaccctgaccgttatcaatctctggtagatatgtttgagcagtcggtcgcgcgctacgccgatcaacctgcgtttgtgaatatgggggaggtaatgaccttccgcaagctggaagaacgcagtcgcgcgtttgccgcttatttgcaacaagggttggggctgaagaaaggcgatcgcgttgcgttgatgatgcctaatttattgcaatatccggtggcgctgtttggcattttgcgtgccgggatgatcgtcgtaaacgttaacccgttgtataccccgcgtgagcttgagcatcagcttaacgatagcggcgcatcggcgattgttatcgtgtctaactttgctcacacactggaaaaagtggttgataaaaccgccgttcagcacgtaattctgacccgtatgggcgatcagctatctacggcaaaaggcacggtagtcaatttcgttgttaaatacatcaagcgtttggtgccgaaataccatctgccagatgccatttcatttcgtagcgcactgcataacggctaccggatgcagtacgtcaaacccgaactggtgccggaagatttagcttttctgcaatacaccggcggcaccactggtgtggcgaaaggcgcgatgctgactcaccgcaatatgctggcgaacctggaacaggttaacgcgacctatggtccgctgttgcatccgggcaaagagctggtggtgacggcgctgccgctgtatcacatttttgccctgaccattaactgcctgctgtttatcgaactgggtgggcagaacctgcttatcactaacccgcgcgatattccagggttggtaaaagagttagcgaaatatccgtttaccgctatcacgggcgttaacaccttgttcaatgcgttgctgaacaataaagagttccagcagctggatttctccagtctgcatctttccgcaggcggtgggatgccagtgcagcaagtggtggcagagcgttgggtgaaactgaccggacagtatctgctggaaggctatggccttaccgagtgtgcgccgctggtcagcgttaacccatatgatattgattatcatagtggtagcatcggtttgccggtgccgtcgacggaagccaaactggtggatgatgatgataatgaagtaccaccaggtcaaccgggtgagctttgtgtcaaaggaccgcaggtgatgctgggttactggcagcgtcccgatgctaccgatgaaatcatcaaaaatggctggttacacaccggcgacatcgcggtaatggatgaagaaggattcctgcgcattgtcgatcgtaaaaaagacatgattctggtttccggttttaacgtctatcccaacgagattgaagatgtcgtcatgcagcatcctggcgtacaggaagtcgcggctgttggcgtaccttccggctccagtggtgaagcggtgaaaatcttcgtagtgaaaaaagatccatcgcttaccgaagagtcactggtgactttttgccgccgtcagctcacgggatacaaagtaccgaagctggtggagtttcgtgatgagttaccgaaatctaacgtcggaaaaattttgcgacgagaattacgtgacgaagcgcgcggcaaagtggacaataaagcctaa

SEQ ID NO: 288 - protein, 561 aa, Escherichia coli
MKKVWLNRYPADVPTEINPDRYQSLVDMFEQSVARYADQPAFVNMGEVMTFRKLEERSRAFAAYLQQGLGLKKGDRVALMMPNLLQYPVALFGILRAGMIVVNVNPLYTPRELEHQLNDSGASAIVIVSNFAHTLEKVVDKTAVQHVILTRMGDQLSTAKGTVVNFVVKYIKRLVPKYHLPDAISFRSALHNGYRMQYVKPELVPEDLAFLQYTGGTTGVAKGAMLTHRNMLANLEQVNATYGPLLHPGKELVVTALPLYHIFALTINCLLFIELGGQNLLITNPRDIPGLVKELAKYPFTAITGVNTLFNALLNNKEFQQLDFSSLHLSAGGGMPVQQVVAERWVKLTGQYLLEGYGLTECAPLVSVNPYDIDYHSGSIGLPVPSTEAKLVDDDDNEVPPGQPGELCVKGPQVMLGYWQRPDATDEIIKNGWLHTGDIAVMDEEGFLRIVDRKKDMILVSGFNVYPNEIEDVVMQHPGVQEVAAVGVPSGSSGEAVKIFVVKKDPSLTEESLVTFCRRQLTGYKVPKLVEFRDELPKSNVGKILRRELRDEARGKVDNKA

SEQ ID NO: 289 - DNA, 2235 bp, Saccharomyces cerevisiae
atggccgctccagattatgcacttaccgatttaattgaatcggatcctcgtttcgaaagtttgaagacaagattagccggttacaccaaaggctctgatgaatatattgaagagctatactctcaattaccactgaccagctatcccaggtacaaaacatttttaaagaaacaggcggttgccatttcgaatccggataatgaagctggttttagctcgatttataggagttctctttcttctgaaaatctagtgagctgtgtggataaaaacttaagaactgcatacgatcacttcatgttttctgcaaggagatggcctcaacgtgactgtttaggttcaaggccaattgataaagccacaggcacctgggaggaaacattccgtttcgagtcgtactccacggtatctaaaagatgtcataatatcggaagtggtatattgtctttggtaaacacgaaaaggaaacgtcctttggaagccaatgattttgttgttgctatcttatcacacaacaaccctgaatggatcctaacagatttggcctgtcaggcctattctctaactaacacggctttgtacgaaacattaggtccaaacacctccgagtacatattgaatttaaccgaggcccccattctgatttttgcaaaatcaaatatgtatcatgtattgaagatggtgcctgatatgaaatttgttaatactttggtttgtatggatgaattaactcatgacgagctccgtatgctaaatgaatcgttgctacccgttaagtgcaactctctcaatgaaaaaatcacatttttttcattggagcaggtagaacaagttggttgctttaacaaaattcctgcaattccacctaccccagattccttgtatactatttcgtttacttctggtactacaggtttacctaaaggtgtggaaatgtctcacagaaacattgcgtctgggatagcatttgctttttctaccttcagaataccgccagataaaagaaaccaacagttatatgatatgtgttttttgccattggctcatatttttgaaagaatggttattgcgtatgatctagccatcgggtttggaataggcttcttacataaaccagacccaactgtattggtagaggatttgaagattttgaaaccttacgcggttgccctggttcctagaatattaacacggtttgaagccggtataaaaaacgctttggataaatcgactgtccagaggaacgtagcaaatactatattggattctaaatcggccagatttaccgcaagaggtggtccagataaatcgattatgaattttctagtttatcatcgcgtattgattgataaaatcagagactctttaggtttgtccaataactcgtttataattaccggatcagctcccatatctaaagataccttactatttttaagaagtgccttggatattggtataagacagggctacggcttaactgaaacttttgctggtgtctgtttaagcgaaccgtttgaaaaagatgtcggatcttgtggtgccataggtatttctgcagaatgtagattgaagtctgttccagaaatgggttaccatgccgacaaggatttaaaaggtgaactgcaaattcgtggcccacaggtttttgaaagatattttaaaaatccgaatgaaacttcaaaagccgttgaccaagatggttggttttccacgggagatgttgcatttatcgatggaaaaggtcgcatcagcgtcattgatcgagtcaagaactttttcaagctagcacatggtgaatatattgctccagagaaaatcgaaaatatttatttatcatcatgcccctatatcacgcaaatatttgtctttggagatcctttaaagacatttttagttggcatcgttggtgttgatgttgatgcagcgcaaccgattttagctgcaaagcacccagaggtgaaaacgtggactaaggaagtgctagtagaaaacttaaatcgtaataaaaagctaaggaaggaatttttaaacaaaattaataaatgcaccgatgggctacaaggattcgaaaaattgcataacatcaaagtcggacttgagcctttaactctcgaggatgatgttgtgacgccaacttttaaaataaagcgtgccaaagcatcaaaattcttcaaagatacattagaccaactatacgccgaaggttcactagtcaagacagaaaagctttag

SEQ ID NO: 290 - protein, 744 aa, Saccharomyces cerevisiae
MAAPDYALTDLIESDPRFESLKTRLAGYTKGSDEYIEELYSQLPLTSYPRYKTFLKKQAVAISNPDNEAGFSSIYRSSLSSENLVSCVDKNLRTAYDHFMFSARRWPQRDCLGSRPIDKATGTWEETFRFESYSTVSKRCHNIGSGILSLVNTKRKRPLEANDFVVAILSHNNPEWILTDLACQAYSLTNTALYETLGPNTSEYILNLTEAPILIFAKSNMYHVLKMVPDMKFVNTLVCMDELTHDELRMLNESLLPVKCNSLNEKITFFSLEQVEQVGCFNKIPAIPPTPDSLYTISFTSGTTGLPKGVEMSHRNIASGIAFAFSTFRIPPDKRNQQLYDMCFLPLAHIFERMVIAYDLAIGFGIGFLHKPDPTVLVEDLKILKPYAVALVPRILTRFEAGIKNALDKSTVQRNVANTILDSKSARFTARGGPDKSIMNFLVYHRVLIDKIRDSLGLSNNSFIITGSAPISKDTLLFLRSALDIGIRQGYGLTETFAGVCLSEPFEKDVGSCGAIGISAECRLKSVPEMGYHADKDLKGELQIRGPQVFERYFKNPNETSKAVDQDGWFSTGDVAFIDGKGRISVIDRVKNFFKLAHGEYIAPEKIENIYLSSCPYITQIFVFGDPLKTFLVGIVGVDVDAAQPILAAKHPEVKTWTKEVLVENLNRNKKLRKEFLNKINKCTDGLQGFEKLHNIKVGLEPLTLEDDVVTPTFKIKRAKASKFFKDTLDQLYAEGSLVKTEKL

SEQ ID NO: 291 - DNA, 1557 bp, Glycine max
atggatactccaatgaccctcacgggcttgctccgcgacgtcgccgccaaattcccttcccgccgcgccatctccgtcgccggaaaattcgacctcacccactcccgcctccatcaactggttgaatccgccgccgcccgcttagtcgccgccggaatcaaacccggcgacgtcatcgctctcaccttccccaataccgtcgagtttgttgtcttgtttctagccgtcattcgagtgcgcgccacagccgcgccgttaaacgcggcttacacagccgaagagtttgagttttacttgtccgactccgagtccaagcttcttctaacatcagcagaaggaaacaactcagctcaagccgcagcttcaaaactcaacatccttcacagcacagcttcaataacccaagccggagacaaagaagccgagctgagcctctcattaagccactccgagtcagagtcaattaactcggttgagtcactcggaaacgatccagatgacgtggcgcttttccttcacacctcgggcaccacgagccgacccaagggagtgcctttgacgcaacacaacctgttctcttccgtgaacaacattaaatcggtgtaccgactcactgagtccgactcgacggtgatcgttcttcctttattccacgtgcacggtttgatcgcggggctcctgagttcgctcggcaccggggcggcggtggcgctgccggcagcggggagattctccgcctcgtcattctggaaggacatgattaaatacagcgccacgtggtacacagcggttcctacaatacaccagatcatactggaccgccactcgaacagccccgaaccggtttacccgcgcctccggttcattcgaagctgcagcgcgtcgctcgcaccggctattctgggtaaacttgaggaggccttcggtgcgccagtgctggaggcttacgcgatgacggaagcgtcgcatttgatggcttcgaaccctttgccgcaagatgggccccacaaggccgggtcggttgggaaacccgtgggtcaagaaatggttatattggacgaaacgggtcgggttcaagatgctgaagttagtggagaggtttgcattaggggtcctaatgttacgaagggatataaaaataacgtggatgccaatacggcggcgtttttgtttggttggtttcacaccggtgatgttgggtacttggattctgatgggtatttgcatctcgtgggtcggatcaaggagctcatcaaccgaggaggagaaaagatatcaccaatagaagtggatgctgtccttctttcacacccagacattgctcaggcagttgcttttggagtgcctgatccaaagtatggggaggagatatactgtgctgtaatcccaagagaaggatcagacattgatgatgcagagttgctaagatattgcaagaagaatcttgcatctttcaaagtccccaaaaaggtcttcattaccgattctttgcccaagactgccaccggaaagattttgcgtcgtcttgtggcagaacactttgtctctcaaatttga

SEQ ID NO: 292 - protein, 518 aa, Glycine max
MDTPMTLTGLLRDVAAKFPSRRAISVAGKFDLTHSRLHQLVESAAARLVAAGIKPGDVIALTFPNTVEFVVLFLAVIRVRATAAPLNAAYTAEEFEFYLSDSESKLLLTSAEGNNSAQAAASKLNILHSTASITQAGDKEAELSLSLSHSESESINSVESLGNDPDDVALFLHTSGTTSRPKGVPLTQHNLFSSVNNIKSVYRLTESDSTVIVLPLFHVHGLIAGLLSSLGTGAAVALPAAGRFSASSFWKDMIKYSATWYTAVPTIHQIILDRHSNSPEPVYPRLRFIRSCSASLAPAILGKLEEAFGAPVLEAYAMTEASHLMASNPLPQDGPHKAGSVGKPVGQEMVILDETGRVQDAEVSGEVCIRGPNVTKGYKNNVDANTAAFLFGWFHTGDVGYLDSDGYLHLVGRIKELINRGGEKISPIEVDAVLLSHPDIAQAVAFGVPDPKYGEEIYCAVIPREGSDIDDAELLRYCKKNLASFKVPKKVFITDSLPKTATGKILRRLVAEHFVSQI

SEQ ID NO: 293 - DNA, 1416 bp, Glycine max
atggggatccgaaagggcaacgtggtcctcatcctctcccccaactccatccacttccccgttgtgtgcctggccgtcatgtccctcggcgccatcatcaccaccaccaaccccctcaacaccacccgcgaaatcgccaagcagatcgccgattccaagcctctcctcgccttcacgatctctgatttactccccaaaatcaccgcagctgcaccctctctaccaatcgttctcatggacaacgacggcgccaataataacaataacaataataatatcgtggccactcttgatgagatggcgaagaaggaaccggtggctcagcgcgtgaaagagcgcgtggagcaggacgacacggccacgctgctctactcctccggcaccacggggcccagcaagggcgtggtatcgtcccaccgcaacctcatagcaatggtccagatcgtgctgggtcggttccacatggaggagaacgaaaccttcatatgcacggtccccatgtttcacatatacggcctggtcgccttcgccacggggcttctggcttccggctccaccatcgtcgtgctctccaagttcgagatgcacgacatgctctcctcgatcgagaggttccgcgccacttacctcccgctcgtgccgcccattctggtggccatgctcaacaacgccgccgctatcaagggcaagtacgatatcacgtcgctgcattcggtgctctccggtggggctccgttgagcaaggaggtcatagagggctttgtggccaagtatcccaacgtcaccatccttcagggttatggtttgacggaatccaccggcgttggggcctccaccgactccttggaggagagtcgaaggtacggcacggcggggctcttgtctccggccacccaggctatgatcgtcgatcctgaatccggccaatcgcttccggttaaccgcaccggggagctctggctcaggggtcccaccatcatgaaaggttatttcagtaacgaagaagcaaccacatcaacccttgattcaaaaggatggttaagaacaggggatatttgttacattgacaatgatggattcatatttattgtggatcggttaaaggagctcatcaaatacaagggatatcaggttcctccagcagaactagaggccttgctactgactcatcctgctattttagatgccgctgttatcccgtatccagataaggaagctgggcagcatccaatggcatacgtggtgaggaaggctggaagtagcttatcagaaactcaagttatggattttgttgcaggacaggtggctccgtacaagcggattcgaaaagtggcatttatttcctccatacccaaaaatccatctggcaaaattcttcggaaggatctcatcaaactcgcaacgtctaaactctga

SEQ ID NO: 294 - protein, 471 aa, Glycine max
MGIRKGNVVLILSPNSIHFPVVCLAVMSLGAIITTTNPLNTTREIAKQIADSKPLLAFTISDLLPKITAAAPSLPIVLMDNDGANNNNNNNNIVATLDEMAKKEPVAQRVKERVEQDDTATLLYSSGTTGPSKGVVSSHRNLIAMVQIVLGRFHMEENETFICTVPMFHIYGLVAFATGLLASGSTIVVLSKFEMHDMLSSIERFRATYLPLVPPILVAMLNNAAAIKGKYDITSLHSVLSGGAPLSKEVIEGFVAKYPNVTILQGYGLTESTGVGASTDSLEESRRYGTAGLLSPATQAMIVDPESGQSLPVNRTGELWLRGPTIMKGYFSNEEATTSTLDSKGWLRTGDICYIDNDGFIFIVDRLKELIKYKGYQVPPAELEALLLTHPAILDAAVIPYPDKEAGQHPMAYVVRKAGSSLSETQVMDFVAGQVAPYKRIRKVAFISSIPKNPSGKILRKDLIKLATSKL

SEQ ID NO: 295 - DNA, 1572 bp, Glycine max
atgaaagacacaatggaaactcctacgacactcaccaccttgctccgccacgtcgccgccaaattcccctcccgccgtgccatctccgtcgctgccaaattcgacctcacccactcccgcctccaccgcctggtcgaatccgccgccgctcagttagtctccgccggcgtcaaacccggcgacgtcgtcgccctcaccttccccaacaccatcgagtttgtagtcatgttcctagccgtcattcgggctcgagccacagccgcgccgttaaactcggcttacacagcggaagagttcgagttttacttatccgactcggagtccaagctcctcctaacatcaccagaaggaaacaagcctgctcaagccgcggcttcaaagctctgcatcccccacgccacggcttcgattaccaaagccgagaacgaagaagcggagctgagtctctcattattaaaccaccccgagttgaattccgttaactcagttgagtcactcgttaacgaccctgatgacgtggcacttttccttcacacctctggcaccacgagccgtcccaagggagtgccgctgactcagtacaaccttctctcttcggtgaagaacatcgactcagtgtaccgactcactgagtccgactcgacggtgattgttcttcctctcttccacgtgcacgggttaatcgccggattgctgagctccctcggcgccggagctgcggtggcgcttccggcggcggggaggttctccgcctcggcgttttggaaggacatgattaaatacagcgccacatggtacaccgcggttcccaccatacaccagatcatacttgatcgccactccagcaaccccgaaccggtttacccgcggctccggttcatccgaagctgcagcgcctcgctcgcaccggttatactcggtaaactcgaggaggctttcggtgcaccggttttagaggcctatgcgatgacggaagcgtcgcatttgatggcttcgaaccctttgccacaagatggggcccacaagtccgggtcggttgggaaacccgtgggtcaggaaatgggcattttagacgaatcgggtcgggtccaagaggctggtatcagtggagaggtttgcattcggggatccaatgttacgaaaggatataaaaataacgtggcagcaaatacggcgtcgtttctgttcgattggtttcatactggtgatattggatactttgattctgatgggtatttgcatctcgtgggtcggatcaaggaactcatcaaccgaggaggtgaaaagatatcaccaatagaagtggatgctgttcttctttcacatccagaaattgctcaagcagttgcttttggagtgcctgatgccaagtatggagaggagatatattgtgctgtcatcccaagagaaggatcaaacgttgatgaggcagaggtgctaagatttagcaagaccaatcttgcatccttcaaagtaccaaaaaaggtcttcattactgattctttacccaaaactgccacaggcaagattttgcgccgtcttgtggcagaacactttgtctctcaaatttga

SEQ ID NO: 296 - protein, 523 aa, Glycine max
MKDTMETPTTLTTLLRHVAAKFPSRRAISVAAKFDLTHSRLHRLVESAAAQLVSAGVKPGDVVALTFPNTIEFVVMFLAVIRARATAAPLNSAYTAEEFEFYLSDSESKLLLTSPEGNKPAQAAASKLCIPHATASITKAENEEAELSLSLLNHPELNSVNSVESLVNDPDDVALFLHTSGTTSRPKGVPLTQYNLLSSVKNIDSVYRLTESDSTVIVLPLFHVHGLIAGLLSSLGAGAAVALPAAGRFSASAFWKDMIKYSATWYTAVPTIHQIILDRHSSNPEPVYPRLRFIRSCSASLAPVILGKLEEAFGAPVLEAYAMTEASHLMASNPLPQDGAHKSGSVGKPVGQEMGILDESGRVQEAGISGEVCIRGSNVTKGYKNNVAANTASFLFDWFHTGDIGYFDSDGYLHLVGRIKELINRGGEKISPIEVDAVLLSHPEIAQAVAFGVPDAKYGEEIYCAVIPREGSNVDEAEVLRFSKTNLASFKVPKKVFITDSLPKTATGKILRRLVAEHFVSQI

SEQ ID NO: 297 - DNA, 1329 bp, Zea mays
atgtccatcggcgctgtcgtctcgcctgccaacccggcgtccaccgccgaggagtacacgcacatggtcgcgctctccagaccggtcgtcgcgctcgcggctcccgaggtggccgctaagcttccgaggaacctcaggtgcgttgtcatcggctcgaatgagtacaagagcctctcctccgccggcggtgtagcgccgtccccgccggtggcggtgaagcagtccgacacggcggccgtactgtactcgtcgggcaccacgggtcgggtcaaggccgccgcggtctcgcaccgcaacctcatcgcggtgatcagcgcgcacaggaacaaccgggttatagcggagaaggaggctgccgaggccggcgaggagccgctcccgcctacggtgacgctgttccccctcccactcttccacgtattcgggttcatgatgctgctgaggtcggtggccatgggggagactgccgtcctcatggaccgattcgacttcatcgcagcgctgcgcgccatcgagcggtaccgcgtcacgctgctgcccgcggcgcccccggtgctggtggccatgatcaagtccgaggaggcgcgccgttgcgacctctcctccctcctcttcatcggcatcggcggcgcgcccctcggccgcgaggtcgccgagcgcttcgccgccatcttccccaacatagaactcattcagggctacggtctgacggagacatctggttctgtggcttcgacggtcgggccagatgagtgcaaagcgtacggttcggtcgggaagctggcatcgcacttggaggcgaagatcgtcgatccctccaccggcgaggcgcttgggccagggcagcgcggcgagctctgggtccgaggaccagtcgtcatgaaaggttatgtcggtgacgacgaggctactgcagcaacagtggattcagaaggctggttgaaaaccggtgacctatgctacttcaacgaggatgggttactctacattgttgatcggttgaaagagttgataaagtacaagggatatcaggtacctcctgccgaactggagcatatcctgaattctcatcctgatatcatggacgcagcagttattccttatccagacgaagacgccgggcaactcccaatggcttttatagtgaggaaaccagggtcaaaccttaccgagcaacaagtcatggatttcgtggctaaacaggtcgcaccctacaagaaagttcgtcgagtggcctttgtttctgcaatccccaaatcgcctgctgggaagatcttgcggcgggagcttgtagagcaggccgtgtccatgggtacctccaagctttga

SEQ ID NO: 298 - protein, 442 aa, Zea mays
MSIGAVVSPANPASTAEEYTHMVALSRPVVALAAPEVAAKLPRNLRCVVIGSNEYKSLSSAGGVAPSPPVAVKQSDTAAVLYSSGTTGRVKAAAVSHRNLIAVISAHRNNRVIAEKEAAEAGEEPLPPTVTLFPLPLFHVFGFMMLLRSVAMGETAVLMDRFDFIAALRAIERYRVTLLPAAPPVLVAMIKSEEARRCDLSSLLFIGIGGAPLGREVAERFAAIFPNIELIQGYGLTETSGSVASTVGPDECKAYGSVGKLASHLEAKIVDPSTGEALGPGQRGELWVRGPVVMKGYVGDDEATAATVDSEGWLKTGDLCYFNEDGLLYIVDRLKELIKYKGYQVPPAELEHILNSHPDIMDAAVIPYPDEDAGQLPMAFIVRKPGSNLTEQQVMDFVAKQVAPYKKVRRVAFVSAIPKSPAGKILRRELVEQAVSMGTSKL

SEQ ID NO: 299 - DNA, 1668 bp, Zea mays
atggcccgcaccgcggcgccggccgcgggctacggagaggacggagtgtaccgctccccgcgcccggccgtgcgcatcgagtccgacacaggcctctccctcaacgacctcctcttccgccgcgccgacgtgtgcccctccgctctcgcgctggtcgactccgccaccggccaatccctcaccttcgccgcctttcgctccgccgtcctcaccacggccgtcgccctctcctcgcgcgcgggcgtccggcgcggcgacgtcgtcctcttcttcgcccccaactgcttcctctaccccgtctgcttcttcgccgtcaccgccctcggcgccgtcgctaccacggccaaccccctctacacccctcgggaggtcgctaaacaggccaccgactcgcgggccaagctcgcaatcacggtctctgaactccttcccaaaatcgtggacctcggcttccccaccatcctgctcgacggcggcggcgacggcgacgcggccagtgccgccgcctccaagcctcagggagccagcgtgacgctttactcagacctcgtttccggggcgcgggagacggagtaccgccgcccgccgacgaagcagagcgacacgaccgcgctgatgtactcgtccggcacgacgggggcgagcaagggcgtaatcctgacacaccgcaacttcatctcggcggcggccatgatgacagcggaccaggacgcgctcggagaggggcccaacgtcttcctctgcttcctgcccatgttccacatcttcggcttgtccgtcatcacgttcgcgcagatgcagcgtggcaattccgtcgtcgtgatgtcgcggtttgacatggactctgtgatggccgcggtgcagcggcaccgtgtcactcacctcttctgcgtgccgccggtcatgatagcgctcgccaagctcgggagcgttgggaaatatgacctcagctcgctcaggttcatcggctctggcgcagcaccgctcggcaaggacgtgatggagggagtggccaagaattttccagaagctgtgattgcccagggttacggaatgactgaaacttgtgggatcatatctttagagtacccagaaaaaggacaaattcgtcaatttggttcaactggagcacttgtctcaggagttgaagcaaaaattgttgatgtagaaacattgatatgtctgccaccaaatcaactaggagaaatttgtgttcgaggaccgaacataatgcaagggtatttcaacaatgtgcaagctactgaatttacaatcaagcaagggtggttgcatactggtgatattggatactttgatgagggaggtcagcttttcgtagttgatagacttaaagaactgattaagtacaaaggttttcagattgcacctgccgagcttgaagggctacttctgtctcatccagaaattctggatgctgttgttatcccgttccccgatgctgaagctggtgaagttcctattgcttacgtcgtaaggtcctctgagagttctttgactgaagttgatgtccagaaatttattgaaaagcaggtcgcatactacaaaaaattgaggagggtgacctttgtggacagcgtaccaaaatctgcttcagggaagatcttgagaagagaactcatctctaaagtcagatcatccaagctatag

SEQ ID NO: 300 - protein, 555 aa, Zea mays
MARTAAPAAGYGEDGVYRSPRPAVRIESDTGLSLNDLLFRRADVCPSALALVDSATGQSLTFAAFRSAVLTTAVALSSRAGVRRGDVVLFFAPNCFLYPVCFFAVTALGAVATTANPLYTPREVAKQATDSRAKLAITVSELLPKIVDLGFPTILLDGGGDGDAASAAASKPQGASVTLYSDLVSGARETEYRRPPTKQSDTTALMYSSGTTGASKGVILTHRNFISAAAMMTADQDALGEGPNVFLCFLPMFHIFGLSVITFAQMQRGNSVVVMSRFDMDSVMAAVQRHRVTHLFCVPPVMIALAKLGSVGKYDLSSLRFIGSGAAPLGKDVMEGVAKNFPEAVIAQGYGMTETCGIISLEYPEKGQIRQFGSTGALVSGVEAKIVDVETLICLPPNQLGEICVRGPNIMQGYFNNVQATEFTIKQGWLHTGDIGYFDEGGQLFVVDRLKELIKYKGFQIAPAELEGLLLSHPEILDAVVIPFPDAEAGEVPIAYVVRSSESSLTEVDVQKFIEKQVAYYKKLRRVTFVDSVPKSASGKILRRELISKVRSSKL

SEQ ID NO: 301 - protein, 1749 aa, Zea mays
ATGGGTTCCACTTCCACGGGGCCGGTGAGCGGGTTCGCGGCGCCGGAGCGGGACATCGACGATCTGCCGCGGAACGACGCCAACTACACGGCGCTCACGCCGCTCTGGTTCCTCGAGCGCGCGGCGCTGGCGCATCCGGGCAGGGCCTCCGTCGTGCACGGCCCCGTGCGCTACACCTGGGCTGACACCTATCGCCGCTGCCGCCGCCTCGCATCCGCCCTCGCGCGCCTATCCGTCGGCCACGGAAGCACGGTTGCTGTGATAGCTCCTAATGTCCCAGCCGTCTATGAAGCTCACTTCGGTGTCCCAATGTCAGGAGCTGTTGTGAACTGCGTCAATATTCGGCTAAACGCCGAGACAATAGCATTCCTCCTTGAACACTCCGTGGCAGAAGTTGTGATGGTGGACCAAGAATTCTTCACCCTAGCCGAAGAATCGCTGAAAATAATTGGCAAGAAGAAGACATCGGCTTTCAGGCGGCCTCCAATCTTGATCGTCATCGGCGACCCGACCTGTGATCCCAAGTCTCTACAGCATGCTCTGGGAAAGGGAGCTATAGAGTATGAAGAGTTTCTGAAAACCGGTGACCCGGAGTTCAGTTGGAAGCCACCGAAGGACGAATGGCAGAGCATCGCCCTAGGCTACACTTCTGGGACTACTTCCAGCCCAAAGGGCGTCGTGTTGCATCACCGCGGTGCTTATCTCATGGCACTCAGCGTTGCCATCGTGTGGGGGATGCCTGAAGGGGCTGTCTACCTGTGGACTCTGCCCATGTTCCATTGCAATGGTTGGTGCTACACTTGGGCGCTGGCAGCGTTCTGCGGAACAAGCATATGTCTTCGCCAGGTGAGCACAAAAGCTATATACGAAGGCATCACCAAGCAAGGAGTGACGCACTTCTGTGCCGCACCTGTCGTCCTTAACAACCTGATCAACGCTCCGGCAAGCGAGACCTTCCTGCCGCTGCCCCGCGTCGTCAATGTCAACGTGGCCGGAGCCGCCCCGACGCCGTCCCTGCTGGGCGCGCTGTCCATCCGTGGGTTCCGCGTCACGCACACGTACGGCCTGTCAGAGACGTACGGTCCCTCGACGGTGTGCGCGTGGAAGCCCGAGTGGGACGAGCTGCCGCTGGAGGAGCGGTCCCGGCTGCACTGCCGACAGGGCGTCAGGTACATCGCGATGGAGGGCCTGGACGTCGTGGACCCCAAGACGATGGCGCCCGTCCCGGCCGACGGCAAGTCGTACGGCGAGATCGTGCTGCGGGGCAACGCCGTGATGAAGGGGTACCTCAAGAACCCCGGGGCGAACGCGGAGGCGTTCGCGGGCGGGTGGTACCACTCGGGCGACCTCGGCGTGAAGCACCCCGACGGGTACGTCGAGGTGAGGGACCGGATGAAGGACGTGATCATCTCCGGAGGGGAGAACATCAGCAGCCTGGAGGTCGAGAAGGTGCTGTGCGCGCACCCGGCAGTGTTCGAGGTATCGGTGGTCGCCAGGGCCGACGAGCGGTGGGGCGAGTCGCCGTGCGCGTTCGTGACGCTCAAGGACGGAGCAGCAGCCGACGGGTCGGACGAGGCGGCGCTGGCCAACGACATCATGCGCTTCTGCCGGGAGAGGATGCCGGGGTACTGGGTGCCCAAGTCGGTCATCTTCGGGCCGCTGCCCAAGACGGCCACGGGGAAGATCAAGAAGCACGAGCTGAGGGCCAGGGCCAAAGAGCTCGGCCCTGTGAAGAAGAGCAGGATGTGA

SEQ ID NO: 302 - protein, 582 aa, Zea mays
MGSTSTGPVSGFAAPERDIDDLPRNDANYTALTPLWFLERAALAHPGRASVVHGPVRYTWADTYRRCRRLASALARLSVGHGSTVAVIAPNVPAVYEAHFGVPMSGAVVNCVNIRLNAETIAFLLEHSVAEVVMVDQEFFTLAEESLKIIGKKKTSAFRRPPILIVIGDPTCDPKSLQHALGKGAIEYEEFLKTGDPEFSWKPPKDEWQSIALGYTSGTTSSPKGVVLHHRGAYLMALSVAIVWGMPEGAVYLWTLPMFHCNGWCYTWALAAFCGTSICLRQVSTKAIYEGITKQGVTHFCAAPVVLNNLINAPASETFLPLPRVVNVNVAGAAPTPSLLGALSIRGFRVTHTYGLSETYGPSTVCAWKPEWDELPLEERSRLHCRQGVRYIAMEGLDVVDPKTMAPVPADGKSYGEIVLRGNAVMKGYLKNPGANAEAFAGGWYHSGDLGVKHPDGYVEVRDRMKDVIISGGENISSLEVEKVLCAHPAVFEVSVVARADERWGESPCAFVTLKDGAAADGSDEAALANDIMRFCRERMPGYWVPKSVIFGPLPKTATGKIKKHELRARAKELGPVKKSRM

SEQ ID NO: 303 - DNA, 1431 bp, Zea mays
atggctggggcagtggtcaactgtgtcaacattcgactaaatgctgccactgtagcatttctcttggagcactcctcagcagaagttgtcatggttgaccaagaatttttcaccctggcagaggattctttgaggattatcgcagataaaaagaaaggcacttttgaacagccacttctaatagttattggtgacgcaacttgcgatccaacaaccctccaagacgctttgagaaaaggagccatcgattatgaggcattcttggaaagtggagatcctgaatttgcttggagaccaccacaggatgaatggaagagtatcgcgctaggttatacttctgggacaacttctaacccaaagggtgtggtattgcatcacaggggggcttacctaatgtcactgagtggtgctttgatatggggaatgaacgaaggcgctgtttacttgtggactttgccaatgttccattgcaacggttggtgctatacatggacacttgctgctctctgcgggacaagcatatgtcttcgtcaggtttcagcgaaggccatcttctcagctatagccaacgagggcgtgactcacttctgtggggcaccggtcgtcctgaacaccatcatcaacgcccctccagccgacacgattctccccctacctcgtgtcgtcaacgtcatgaccgctggcgctgctccgccaccctctgtcctggcggcaatgtcgaagcttgggttccgcatcactcacacctacggcctgtcggagacctatggaccatccacggtgtgcgcctggaagccggaatgggacaggctgccagccgacgagcgcgcccggctccacgcgcgtcagggcgtccgttacgtgggcctggagggcctggacgtggtggacccgaagacgatgacgccggtcccggccgacggcaccacgatgggggagatcgtgatgcgcgggaacggcgtcatgaaggggtacctgaagaacccggaggcgaacgcggaggcgttcgagaacgggtggttccactcgggcgacctgggcgtgcggcacggcgacgggtacgtcgaggtgagggaccgcgccaaggacatcatcatctccggcggggagaacatcagcagcctggaggtggagaaggcggtgtacctgcacccggcggtgctggaggcgtcggtcgtggcccgcgccgacgagcggtggggggagtcgccgtgcgcgttcgtgacgctcaaggacgccgtggaccgctccgacgaggcggcgctggcgcgggacatcatgcggttctgccgcgagaagctgcccggttactgggtgcccaagtccgtggtgttcgggccgctgcccaagacagcgaccggcaagatcaagaagcatgagctcagggccaaggccaaggaactgggcccggtcgggaagagcaggatgtga

SEQ ID NO: 304 - protein, 476 aa, Zea mays
MAGAVVNCVNIRLNAATVAFLLEHSSAEVVMVDQEFFTLAEDSLRIIADKKKGTFEQPLLIVIGDATCDPTTLQDALRKGAIDYEAFLESGDPEFAWRPPQDEWKSIALGYTSGTTSNPKGVVLHHRGAYLMSLSGALIWGMNEGAVYLWTLPMFHCNGWCYTWTLAALCGTSICLRQVSAKAIFSAIANEGVTHFCGAPVVLNTIINAPPADTILPLPRVVNVMTAGAAPPPSVLAAMSKLGFRITHTYGLSETYGPSTVCAWKPEWDRLPADERARLHARQGVRYVGLEGLDVVDPKTMTPVPADGTTMGEIVMRGNGVMKGYLKNPEANAEAFENGWFHSGDLGVRHGDGYVEVRDRAKDIIISGGENISSLEVEKAVYLHPAVLEASVVARADERWGESPCAFVTLKDAVDRSDEAALARDIMRFCREKLPGYWVPKSVVFGPLPKTATGKIKKHELRAKAKELGPVGKSRM

SEQ ID NO: 305 - DNA, 1689 bp, Glycine max
atgataactctagctccttctcttgatactccaaaaactgatcaaaaccaagtttctgatccccaaactagccatgtcttcaaatcaaaattaccagatatcccaatctccaaccacctccctctccactcctactgcttccagaacctctcccaatttgcccaccgcccttgcctcatcgtcggacccgcctccaaaaccttcacctacgccgacacccacctcatttccagcaagatcgccgccggattgtccaacctcggaatcctcaagggcgacgtcgtcatgatcctcctccagaactccgccgatttcgtcttctccttcctcgccatctccatgattggcgccgtcgccaccaccgccaacccgttctacaccgccccggagatcttcaagcagttcaccgtctccaaggcgaagtcgatcataacacaggcaatgtacgtggacaagctccgcaaccacgacggcgcgaagctcggcgaggacttcaaggtcgtaaccgtcgacgatccgccggagaattgcctccacttctctgtcctctcggaggcgaacgagagcgacgtgccagaggtggagatccacccggacgacgcggtggcgatgccgttctcctccggcacgacgggtttacctaaaggagtgattctcacgcacaagagtttaaccacgagtgtggcgcagcaagttgacggagagaaccctaacctctacctcaccaccgaggacgtgctcctctgcgtgcttccgctctttcacatattctcgctcaacagtgtgctattgtgcgccctcagggcggggagtgcagttttgttgatgcagaagttcgagatcgggacactgctggagctgatacagcggcaccgagtgtcggtggcgatggtggtgcccccgctggtgttggcgttggcaaagaatccgatggtggcggattttgacctgagttcaatacggttagtgctgtccggagctgctcccttggggaaggagctcgaggaggctctccggaacaggatgcctcaagctgttttgggacagggttacgggatgacagaagcagggccagtgctgtccatgtgcttgggctttgcaaagcaacctttccaaacaaaatcaggctcttgtggtaccgtagtcagaaatgcagaactcaaggttgttgaccctgaaactggtcgttctcttggctacaatcaacccggtgaaatttgcatccgagggcaacagatcatgaaaggatatctgaacgatgaggcagcgacagcatcgaccatagattcagagggttggcttcacaccggtgatgttggctacgtagatgatgatgacgaaattttcattgttgacagggtgaaggaactcatcaaatataaaggcttccaggtgccccctgcagaacttgaagggcttcttgtaagccatccctccattgcagatgcagctgttgtcccacaaaaggatgttgctgctggtgaagttcctgttgccttcgttgtgagatcaaacggctttgatctaactgaagaggctgtaaaagagtttatagctaaacaggtagtgttttacaaaagactgcacaaagtttattttgttcatgctattcccaagtctccatcaggaaagatattaaggaaagacctcagagcaaagctagaaaccgccgccactcagacgccttga

SEQ ID NO: 306 - protein, 562 aa, Glycine max
MITLAPSLDTPKTDQNQVSDPQTSHVFKSKLPDIPISNHLPLHSYCFQNLSQFAHRPCLIVGPASKTFTYADTHLISSKIAAGLSNLGILKGDVVMILLQNSADFVFSFLAISMIGAVATTANPFYTAPEIFKQFTVSKAKSIITQAMYVDKLRNHDGAKLGEDFKVVTVDDPPENCLHFSVLSEANESDVPEVEIHPDDAVAMPFSSGTTGLPKGVILTHKSLTTSVAQQVDGENPNLYLTTEDVLLCVLPLFHIFSLNSVLLCALRAGSAVLLMQKFEIGTLLELIQRHRVSVAMVVPPLVLALAKNPMVADFDLSSIRLVLSGAAPLGKELEEALRNRMPQAVLGQGYGMTEAGPVLSMCLGFAKQPFQTKSGSCGTVVRNAELKVVDPETGRSLGYNQPGEICIRGQQIMKGYLNDEAATASTIDSEGWLHTGDVGYVDDDDEIFIVDRVKELIKYKGFQVPPAELEGLLVSHPSIADAAVVPQKDVAAGEVPVAFVVRSNGFDLTEEAVKEFIAKQVVFYKRLHKVYFVHAIPKSPSGKILRKDLRAKLETAATQTP

SEQ ID NO: 307 - DNA, 1644 bp, Glycine max
atggctgatgatggaagcaggagggaattgatattcaggtcgaagcttccggatatctacatccccaaacatatgcccctccactcttactgcttcgagaatttgagagagtgtggttcacgcccctgcctgatcaatgcccccacgggagacgtctacagctaccacgaggtggacagcaccgccagaaaggtggcgagggggctgaagaaagagggcgtggaacagggccaggtcatcatgatcctcctccccaattgccccgaattcgtcttctcgtttcttggcgcatcccaccgcggtgccatggccactgccgccaaccctttcttcacccccgccgagattgcaaagcaagcccatgcctccaatgccaagctcctcatcacccaggcctcttactacgacaaagtcaaggacctccgcgacatcaagctcgtattcgtcgactcttgtcccccccatacagaggagaagcagcatctccatttctcacatctgtgtgaggataacggtgacgctgatgttgatgttgatgttgatatcaagcccgatgacgtggttgcattgccttattcttcgggaacaactggtcttcccaagggagtgatgctgagccacaaggggctggtgaccagcattgctcagcaggttgacggtgataatcccaacctctattaccactgccacgacaccatcctctgcgtgcttcccctctttcacatttactctctcaactccgttcttctctgtggcttgcgtgccaaggctaccattctcctcatgcccaagttcgatattaactccttgcttgctctcattcacaagcacaaagtcactattgcccctgtcgtccctcccattgttctcgccatttccaaatcacccgatctccacaagtacgacctgtcttccatcagagtcttgaagtccgggggagcccctctgggtaaggaactcgaagacactctcagagctaaattccccaacgccaaacttggccagggatacggaatgactgaggcagggcctgtgctaacaatgtctttagcttttgctaaagaaccgatagacgtgaaaccaggtgcatgtggaaccgttgtaagaaatgcagagatgaagattgtcgatcctgaaaccggtcattctttacccagaaaccaatccggtgaaatttgcataagaggcgaccagattatgaaaggttatctaaatgatggagaggctacagagagaaccatagacaaagatggttggttgcacacaggtgacatcggttacatcgacgatgacgatgagttattcatcgttgacaggctcaaggaattgatcaaatacaaaggatttcaagtggctccagctgaacttgaagcccttcttctcactcatcctaagatctctgatgctgctgttgttccaatgaaggatgaagccgcgggagaggtacctgttgcatttgtggtcatatcaaatggttataccgacacaaccgaggatgaaattaagcagtttatctccaaacaggtggtgttttacaaaagaataaaccgagtattcttcattgatgcaattcccaagtcaccgtcaggcaaaatcttgcgcaaggatctaagagcaaagatagcggcaagtgttccaaaatga

SEQ ID NO: 308 - protein, 547 aa, Glycine max
MADDGSRRELIFRSKLPDIYIPKHMPLHSYCFENLRECGSRPCLINAPTGDVYSYHEVDSTARKVARGLKKEGVEQGQVIMILLPNCPEFVFSFLGASHRGAMATAANPFFTPAEIAKQAHASNAKLLITQASYYDKVKDLRDIKLVFVDSCPPHTEEKQHLHFSHLCEDNGDADVDVDVDIKPDDVVALPYSSGTTGLPKGVMLSHKGLVTSIAQQVDGDNPNLYYHCHDTILCVLPLFHIYSLNSVLLCGLRAKATILLMPKFDINSLLALIHKHKVTIAPVVPPIVLAISKSPDLHKYDLSSIRVLKSGGAPLGKELEDTLRAKFPNAKLGQGYGMTEAGPVLTMSLAFAKEPIDVKPGACGTVVRNAEMKIVDPETGHSLPRNQSGEICIRGDQIMKGYLNDGEATERTIDKDGWLHTGDIGYIDDDDELFIVDRLKELIKYKGFQVAPAELEALLLTHPKISDAAVVPMKDEAAGEVPVAFVVISNGYTDTTEDEIKQFISKQVVFYKRINRVFFIDAIPKSPSGKILRKDLRAKIAASVPK

SEQ ID NO: 309 - DNA, 1638 bp, Glycine max
atggcaccttctccacaagaaatcatcttccgatccccactccccgatattcccatccccacacatctcccattgtactcttactgcttccaaaacttgtcaaagttccatgaccgtccatgcctcatcgacggcgacaccggcgagaccctcacctacgccgacgtcgacctcgctgctcgccgcatcgcctccggcctccacaaaatcggcatccgccagggtgacgtcatcatgctcgtcctacgcaactgcccgcagttcgccctcgccttcctcggcgccacccaccgtggcgccgtcgtcaccacagccaaccccttctacacgccggcggagcttgcgaagcaagcgacggccacgaaaaccaggctcgtcataacgcaatccgcgtacgttgagaaaatcaagagtttcgcggacagcagcagcgatgtcatggtgatgtgcattgatgatgatttttcttatgaaaacgacggcgttttgcatttctcaacgctcagtaacgccgacgaaacggaagcccctgccgttaagattaaccctgacgagctcgttgcgcttccgttttcttctggcacgtctgggctccccaagggcgttatgttatcgcatgaaaacttggtcaccacgatatcgcagttagttgacggcgaaaacccgcaccagtacacgcacagcgaggatgtgttactctgtgtgttgcctatgtttcacatctatgcgctcaattctattttgctctgcgggattcgatctggtgcggctgtacttattgtgcaaaagtttgagatcactactctgtttgagctcatcgagaagtacaaggtgacggttgcgtcgtttgttcctcccatcgttttggcgttggttaagagcggagagactcatcgctacgacctgtcgtctattcgcgctgtggtcaccggcgcggcacccttgggaggggaacttcaagaagccgttaaggctaggctaccacacgctacttttggacagggatatgggatgacagaagcaggaccacttgccattagcatggcatttgcaaaagaaccctcgaagattaaaccaggtgcatgcggaaccgttgtgagaaacgctgagatgaaaatcgtggatacagaaacgggtgattcacttccaagaaacaaatccggagaaatttgcataagaggggcaaaggtcatgaaaggatatctaaatgacccagaggctacagagagaactatagacagagaaggatggttacacacaggagatattggtttcattgatgatgataatgaactcttcattgttgatcggttaaaggaattgatcaaatacaaaggattccaagtagctcctgctgagctcgaagctttgttgattgctcacccaaacatttctgatgctgccgttgtaggtatgaaagatgaagctgcaggagaaattccagttgcatttgttgtaaggtcaaatggttctgagattaccgaggatgaaataaagacatacatttcacaacaggtggtattttacaagagaataggtagagttttcttcacggactctattcctaaagcaccctccggcaaaattctgcgaaaggtattaactgcaagacttaacgaaggtttggtggtggccaat

SEQ ID NO: 310 - protein, 546 aa, Glycine max
MAPSPQEIIFRSPLPDIPIPTHLPLYSYCFQNLSKFHDRPCLIDGDTGETLTYADVDLAARRIASGLHKIGIRQGDVIMLVLRNCPQFALAFLGATHRGAVVTTANPFYTPAELAKQATATKTRLVITQSAYVEKIKSFADSSSDVMVMCIDDDFSYENDGVLHFSTLSNADETEAPAVKINPDELVALPFSSGTSGLPKGVMLSHENLVTTISQLVDGENPHQYTHSEDVLLCVLPMFHIYALNSILLCGIRSGAAVLIVQKFEITTLFELIEKYKVTVASFVPPIVLALVKSGETHRYDLSSIRAVVTGAAPLGGELQEAVKARLPHATFGQGYGMTEAGPLAISMAFAKEPSKIKPGACGTVVRNAEMKIVDTETGDSLPRNKSGEICIRGAKVMKGYLNDPEATERTIDREGWLHTGDIGFIDDDNELFIVDRLKELIKYKGFQVAPAELEALLIAHPNISDAAVVGMKDEAAGEIPVAFVVRSNGSEITEDEIKTYISQQVVFYKRIGRVFFTDSIPKAPSGKILRKVLTARLNEGLVVAN

SEQ ID NO: 311 - DNA, 2076 bp, Zea mays
atggacgccgcccagcgccgcgtcggtacccacctccagcgcccgccgccgcccgccgggggctacggcctcaccgtcaaccccaccgcggccgagtacgtccacgcgcagggctacagtgtcctcctccctgagaaattgcaaaccggcaggtggaacgtgtaccgatccgcgcgttcaccgttaaggctgataagtagattccctgacaccccagacattggaacgctgcatgacaatttcacgtatgcagttgagacatttacagactgtaagtacctgggaacaagaatcagagcagatggaacaattggagactacaaatggatgacatatggagaagctagcacgagcaggactgcagtaggttctggccttatatatcatggagttcgtgaaggtgcatgcattggtctgtattttgtaaacagacctgagtggattatagttgaccatgcttgttctgcatattcatatgtatctgtgccactttatgacacacttggcccagatgctgttcaattcattgtgaaccatgcagcggtggaagttatattctgtgtgcctcaaactctaagcactctgttaagttttatagctcaaatgccatgtgttcggcttatagtggtagttggtggagatgatgcaaatctgccatcaacgccagtaactactggagtgcaaatcataacttactccaggttgctcatccagggaaaggctagtcctcaacctttttgtcttccaaaacctgaagatgttgccactatctgttacactagtggcactactggcacaccgaagggagctgttctttctcatgggaacttaattgcaaatgtagcaggatcaagcctaaacattaagttttacccatccgatgtgtatatctcatatctgcctttggctcacatttacgagagggttaaccagattgcagcactgcactgtggtgttgccattggattctaccaaggggataatttgaagctcatggatgatctggctgctttgagaccgacaatattcgcaagtgttccccggttatataacagaatttatactgcgattacaaatgctgtgaaggagtctggtgggctgaaagaaaaattgtttcatactgcatacaatgccaagagacaagcaatccttaaagggaaaaatccatccccagtgtgggataagttggtatttaacaaaataaaagctaggcttggtggacgagtgagacttatgagttcaggtgcttctccactgtcagcagatgtcatggaattcctgaggatatgctttggtggtgaagttcttgaaggctatggaatgacggagacatcctgtatcatatctgcaatggatattggtgacagatcaattggtcatgttggatccccaactgcatcttgtgaggtgaaacttgtggatgtcccagaaatgaattatacatctgatgatcaaccttatcctcgtggagaaatttgtgttagaggacctataatattccagggttactataaggatgaagttcaaacaaaagaagtcattgatgaagatggttggttgcacactggagacataggtctgtggctacctggaggacgtttaaagatcatcgataggaaaaagaacattttcaagttagctcaaggagaatacatagctccagagaagattgaaaatgtctatgccaaatgcaagttcattgcccaatgttttatatatggcgacagtttcaactcttccttagttggtattgttgcagttgaaccagaggttatgaaggcttgggctgcatctgaagggatccagtgcgaagacttgaggcagctttgtgctgaccctagagcaagagctgcagtcctggccgacatggattctgttgggaaggaagcacagctaagaggttttgaatttgctaaagctgttcggcttgtcgctgagccattcacagtggacaatggtctcctcaccccaacattcaaggtcaaaaggcagcaagcaaagacatactttgcaaaggaaatttcagatatgtacgcggagctgcgggaggcagaggcacccaggtcgaagttgtaa

SEQ ID NO: 312 - protein, 691 aa, Zea mays
MDAAQRRVGTHLQRPPPPAGGYGLTVNPTAAEYVHAQGYSVLLPEKLQTGRWNVYRSARSPLRLISRFPDTPDIGTLHDNFTYAVETFTDCKYLGTRIRADGTIGDYKWMTYGEASTSRTAVGSGLIYHGVREGACIGLYFVNRPEWIIVDHACSAYSYVSVPLYDTLGPDAVQFIVNHAAVEVIFCVPQTLSTLLSFIAQMPCVRLIVVVGGDDANLPSTPVTTGVQIITYSRLLIQGKASPQPFCLPKPEDVATICYTSGTTGTPKGAVLSHGNLIANVAGSSLNIKFYPSDVYISYLPLAHIYERVNQIAALHCGVAIGFYQGDNLKLMDDLAALRPTIFASVPRLYNRIYTAITNAVKESGGLKEKLFHTAYNAKRQAILKGKNPSPVWDKLVFNKIKARLGGRVRLMSSGASPLSADVMEFLRICFGGEVLEGYGMTETSCIISAMDIGDRSIGHVGSPTASCEVKLVDVPEMNYTSDDQPYPRGEICVRGPIIFQGYYKDEVQTKEVIDEDGWLHTGDIGLWLPGGRLKIIDRKKNIFKLAQGEYIAPEKIENVYAKCKFIAQCFIYGDSFNSSLVGIVAVEPEVMKAWAASEGIQCEDLRQLCADPRARAAVLADMDSVGKEAQLRGFEFAKAVRLVAEPFTVDNGLLTPTFKVKRQQAKTYFAKEISDMYAELREAEAPRSKL

SEQ ID NO: 313 - DNA, 1995 bp, Zea mays
atggtcgcgggatccatgaagcacctcgtgcaggtggagccggcaagggaggcggcggcggagggcggggcgccatcggcggggcccacgtaccgatgcgcggccggtggcaacgccgcgtcgccgcccgccgtgccggggctcgagtgctgctgggacatattccgcttgtccgtggagaagtgccccgacaacaagatgctgggccgccgcgaaattgtccacggaaaggctggcagctacacatggctgacttacaagcaggtatacgacaccgtgctcgatgttgggtctgccatccggagctgtggcgtcggcaagggcggccggtgtggcatctatggagccaattctcctgagtgggtcatcagtatgcaggcctgcaatgcccatggcatctactgtgtgccactatatgacacgcttggtgccggggcagtagaattcgtattgtgccatgcagaggtacaaattgcttttgttgaggaaaagaagatcggagagatgctcaagacatttcccaatgcgaccaaatatctgaaaacacttgtaagcttcggtaaggttgatcctgggcacaaggaaaaagttgaacagaatggcttgtccatctactcatgggaagagtttctgcaactgggaggtaaagagaagtttgaacttccacccaaggaaaaggatgacatatgtacaataatgtacaccagtggaacaactggtgatcctaagggagtactaatctcgaacaagagcattgttaccattgtttcagcagtagatgagttcctcaacaactcaaacgagcagcttaacatggatgacgtttacatttcctatcttccgcttgctcatatatttgaccgggtgattgaagaggtgttcattcgtcatggtgcttcaattggattttggcgtggggatgtcaaactcttggttgaagacattggagaactcaaaccaacagttttttgtgctgttccacgtgttctagacagaatttatggaggattgcaagataaaattacagctggtggtttcctaaagaaaaccttgttcaatgttgcttacaaatacaaacaaggcaatatgttgaagggaaacaagcatgaagaggctgctgccatgtttgatcgcctggtcttcaccaaggtgaaacggggactaggtggaagggttcgcctgattctatctggcgcagctcccctatctagacatgttgaggagtatctgcgtgtggtaacatgctcccatgtccttcaaggatacgggctaacggaaacctgtgctgggtcctttgtttccctgccgaacaacatgtccatgctgggaactgtcggccctccagtcccgtatgtcgaagtacgcctggagtctgtccctgagatgggttatgatgcactgtcgagcgagacgcctcgtggggaaatttgcatcagaggggacaccttgttctcgggatactacaagcgagaggacctaaccaaagaagtcttggtcgatggctggttccacacaggagacattggtgagtggcagtctgacggaagcatgaagatcattgaccgcaagaagaacatcttcaagctctcacagggagagtacgttgcggttgagaatctggagaacatctttggtcaaactcctgctgttgattcgatttgggtctacggcaacagcttcgagtcgagcctggtagcagttgtgaaccccaacacacaagcactggagcgctgggcagagtcgaacggggtaactggagaatttgccacgatatgcgaagaccctagagcgagagagttcatcttgggagagcttacaaagatgggtaaagaaaagaagctcaaaggctttgagctcatcagggctgttcatctggaccccgcaccgttcgacatggagcgcgaccttatcaccccgacgtacaagaagaagcggccacagctgctgaaacactatcagaccatcattgacggtatgtacaatagcatgaagtag

SEQ ID NO: 314 - protein, 664 aa, Zea mays
MVAGSMKHLVQVEPAREAAAEGGAPSAGPTYRCAAGGNAASPPAVPGLECCWDIFRLSVEKCPDNKMLGRREIVHGKAGSYTWLTYKQVYDTVLDVGSAIRSCGVGKGGRCGIYGANSPEWVISMQACNAHGIYCVPLYDTLGAGAVEFVLCHAEVQIAFVEEKKIGEMLKTFPNATKYLKTLVSFGKVDPGHKEKVEQNGLSIYSWEEFLQLGGKEKFELPPKEKDDICTIMYTSGTTGDPKGVLISNKSIVTIVSAVDEFLNNSNEQLNMDDVYISYLPLAHIFDRVIEEVFIRHGASIGFWRGDVKLLVEDIGELKPTVFCAVPRVLDRIYGGLQDKITAGGFLKKTLFNVAYKYKQGNMLKGNKHEEAAAMFDRLVFTKVKRGLGGRVRLILSGAAPLSRHVEEYLRVVTCSHVLQGYGLTETCAGSFVSLPNNMSMLGTVGPPVPYVEVRLESVPEMGYDALSSETPRGEICIRGDTLFSGYYKREDLTKEVLVDGWFHTGDIGEWQSDGSMKIIDRKKNIFKLSQGEYVAVENLENIFGQTPAVDSIWVYGNSFESSLVAVVNPNTQALERWAESNGVTGEFATICEDPRAREFILGELTKMGKEKKLKGFELIRAVHLDPAPFDMERDLITPTYKKKRPQLLKHYQTIIDGMYNSMK

SEQ ID NO: 315 - DNA, 2181 bp, Zea mays
atgggagaagttagtgatgacaattccaacctgtcctttctaaaaagaatcgcaacaagtgacgtaccgctgttgaaagagtatggtgtaaatggagttgtcgtcgctctgcttcttgctgtagttactcccgtcttgctttccatgatgtttggcaagaaaacaaagcagagggcggtgcgagctaatgtgggtggagaggaaggatttgccatgcgaaacagtaggttttcctccttagttgaagtcccatgggaaggcgccaccacgatgtcagctctgttcgagatggccagcaaaaaatactctcgacggaggtgtcttggcacgaggaagctaatcaagagggaatttgtggaatcttctgatggtaggaagtttgagaaactgcaccttggtgaatacgaatgggatacgtacgccgaggcatttaaccgcgcatgtaattttgcttctggacttgtcaagatgggccacgacctagatagtcatgctgctatcttctctgatacaagagctgagtggatcattgctgctcagggatgcttccgacaaaatttgacggttgtaacaatatatgcatctcttggtgaggatgcattggtgcattcactaaacgagacacaggtttcaactctgatatgtgattcgaagcaacttaagaaaatacctgcaatcagctctaaattgcagagtcttaggcatattatctatattgaggatgaacctgtcgaggctgagacactgaaccaagtgaagcatctgacaacattgtctttcactgaagtagaggagttaggcaagacatctagtgttgatgcaaggttaccttcaagctctgatactgcagttatcatgtatacaagcggaagtactggtcttcccaagggtgtaatgatcacacatggcaacatggtggccacaactgcagcagtcatgacaatagtcccaaaacttggcatgaatgatgtttatctggcttaccttccattggctcatgtctttgaactagcaggagagactgtcatgctagcttctggtactgccattggatatggttcaacattgactatgactgatacatcgaacaagattaagaaggggacaaaaggagatgtttctgtactgaatcctactcttataatttcagttcctgcaattttggatcgtatcagagatgcagtgtttaagaaagttggtgagaagggtggcctgacaaaaaagctgtttgattttgcatataagcggaatcttgcatcaattgaggggagttggtttggatcctgggcaccggagaggatgatatgggataccattatttataaaccaatacgggcaatgcttggaggacgtgtaagatttgttctttgtggtggtgcacctttatcaggtgacacacaaagattcatgaatatatgtctaggtgtcccagtgggtcaaggctatggtttgactgaaacctgtgctggagcagctttcactgaatgggatgacacaagtgtgggtcgtgttggtccaccacttccttgctgctatgtgaagcttgtttcatgggaagaaggtggttacaagatttctgattatccgatgccgagaggagaggtcgtggttggcggacacagtataacaaaaggctatttcagcaatgaagcaaagacgaatgaagtatacaaggttgacgagaggggtatacgctggttctacactggtgatattggccagttccatcctgacgggtgccttgagattattgacaggaaaaaagatatagtaaagcttcagcacggagaatatgtgtctcttggcaaggttgaatcggctctagcaacaagtagttatgtggagagcatcatggtctacgccgatccgttccataactactgtgttgccctggttgttccagtacgccaggccctggagaagtgggctcaaaattctgggataaactgtgaaggctttgaagagctttgccaaaatggccaggcggttaaggaggttcagcaatcactatcgaaggccgcgaaagcagcgaggctggagagattcgaggtgccggcgaagatcgagctgctgcctgagccgtggacgccggagtccgggctggtgacggcggcgcttaagctgaagagggagcagataaaggccaaattcaaagacgatctggacaagctctaccactga

SEQ ID NO: 316 - protein, 726 aa, Zea mays
MGEVSDDNSNLSFLKRIATSDVPLLKEYGVNGVVVALLLAVVTPVLLSMMFGKKTKQRAVRANVGGEEGFAMRNSRFSSLVEVPWEGATTMSALFEMASKKYSRRRCLGTRKLIKREFVESSDGRKFEKLHLGEYEWDTYAEAFNRACNFASGLVKMGHDLDSHAAIFSDTRAEWIIAAQGCFRQNLTVVTIYASLGEDALVHSLNETQVSTLICDSKQLKKIPAISSKLQSLRHIIYIEDEPVEAETLNQVKHLTTLSFTEVEELGKTSSVDARLPSSSDTAVIMYTSGSTGLPKGVMITHGNMVATTAAVMTIVPKLGMNDVYLAYLPLAHVFELAGETVMLASGTAIGYGSTLTMTDTSNKIKKGTKGDVSVLNPTLIISVPAILDRIRDAVFKKVGEKGGLTKKLFDFAYKRNLASIEGSWFGSWAPERMIWDTIIYKPIRAMLGGRVRFVLCGGAPLSGDTQRFMNICLGVPVGQGYGLTETCAGAAFTEWDDTSVGRVGPPLPCCYVKLVSWEEGGYKISDYPMPRGEVVVGGHSITKGYFSNEAKTNEVYKVDERGIRWFYTGDIGQFHPDGCLEIIDRKKDIVKLQHGEYVSLGKVESALATSSYVESIMVYADPFHNYCVALVVPVRQALEKWAQNSGINCEGFEELCQNGQAVKEVQQSLSKAAKAARLERFEVPAKIELLPEPWTPESGLVTAALKLKREQIKAKFKDDLDKLYH

SEQ ID NO: 317 - DNA, 954 bp, Escherichia coli
atgtatacgaagattattggtactggcagctatctgcccgaacaagtgcggacaaacgccgatttggaaaaaatggtggacacctctgacgagtggattgtcactcgtaccggtatccgcgaacgccacattgccgcgccaaacgaaaccgtttcaaccatgggctttgaagcggcgacacgcgcaattgagatggcgggcattgagaaagaccagattggcctgatcgttgtggcaacgacttctgctacgcacgctttcccgagcgcagcttgtcagattcaaagcatgttgggcattaaaggttgcccggcatttgacgttgcagcagcctgcgcaggtttcacctatgcattaagcgtagccgatcaatacgtgaaatctggggcggtgaagtatgctctggtcgtcggttccgatgtactggcgcgcacctgcgatccaaccgatcgtgggactattattatttttggcgatggcgcgggcgctgcggtgctggctgcctctgaagagccgggaatcatttccacccatctgcatgccgacggtagttatggtgaattgctgacgctgccaaacgccgaccgcgtgaatccagagaattcaattcatctgacgatggcgggcaacgaagtcttcaaggttgcggtaacggaactggcgcacatcgttgatgagacgctggcggcgaataatcttgaccgttctcaactggactggctggttccgcatcaggctaacctgcgtattatcagtgcaacggcgaaaaaactcggtatgtctatggataatgtcgtggtgacgctggatcgccacggtaatacctctgcggcctctgtcccgtgcgcgctggatgaagctgtacgcgacgggcgcattaagccggggcagttggttctgcttgaagcctttggcggtggattcacctggggctccgcgctggttcgtttctag

SEQ ID NO: 318 - protein, 317 aa, Escherichia coli
MYTKIIGTGSYLPEQVRTNADLEKMVDTSDEWIVTRTGIRERHIAAPNETVSTMGFEAATRAIEMAGIEKDQIGLIVVATTSATHAFPSAACQIQSMLGIKGCPAFDVAAACAGFTYALSVADQYVKSGAVKYALVVGSDVLARTCDPTDRGTIIIFGDGAGAAVLAASEEPGIISTHLHADGSYGELLTLPNADRVNPENSIHLTMAGNEVFKVAVTELAHIVDETLAANNLDRSQLDWLVPHQANLRIISATAKKLGMSMDNVVVTLDRHGNTSAASVPCALDEAVRDGRIKPGQLVLLEAFGGGFTWGSALVRF

SEQ ID NO: 319 - DNA, 960 bp, Escherichia coli
atgagtctgaatttccttgattttgaacagccgattgcagagctggaagcgaaaatcgattctctgactgcggttagccgtcaggatgagaaactggatattaacatcgatgaagaagtgcatcgtctgcgtgaaaaaagcgtagaactgacacgtaaaatcttcgccgatctcggtgcatggcagattgcgcaactggcacgccatccacagcgtccttataccctggattacgttcgcctggcatttgatgaatttgacgaactggctggcgaccgcgcgtatgcagacgataaagctatcgtcggtggtatcgcccgtctcgatggtcgtccggtgatgatcattggtcatcaaaaaggtcgtgaaaccaaagaaaaaattcgccgtaactttggtatgccagcgccagaaggttaccgcaaagcactgcgtctgatgcaaatggctgaacgctttaagatgcctatcatcacctttatcgacaccccgggggcttatcctggcgtgggcgcagaagagcgtggtcagtctgaagccattgcacgcaacctgcgtgaaatgtctcgcctcggcgtaccggtagtttgtacggttatcggtgaaggtggttctggcggtgcgctggcgattggcgtgggcgataaagtgaatatgctgcaatacagcacctattccgttatctcgccggaaggttgtgcgtccattctgtggaagagcgccgacaaagcgccgctggcggctgaagcgatgggtatcattgctccgcgtctgaaagaactgaaactgatcgactccatcatcccggaaccactgggtggtgctcaccgtaacccggaagcgatggcggcatcgttgaaagcgcaactgctggcggatctggccgatctcgacgtgttaagcactgaagatttaaaaaatcgtcgttatcagcgcctgatgagctacggttacgcgtaa

SEQ ID NO: 320 - protein, 319 aa, Escherichia coli
MSLNFLDFEQPIAELEAKIDSLTAVSRQDEKLDINIDEEVHRLREKSVELTRKIFADLGAWQIAQLARHPQRPYTLDYVRLAFDEFDELAGDRAYADDKAIVGGIARLDGRPVMIIGHQKGRETKEKIRRNFGMPAPEGYRKALRLMQMAERFKMPIITFIDTPGAYPGVGAEERGQSEAIARNLREMSRLGVPVVCTVIGEGGSGGALAIGVGDKVNMLQYSTYSVISPEGCASILWKSADKAPLAAEAMGIIAPRLKELKLIDSIIPEPLGGAHRNPEAMAASLKAQLLADLADLDVLSTEDLKNRRYQRLMSYGYA

SEQ ID NO: 321 - DNA, 1350 bp, Escherichia coli
atgctggataaaattgttattgccaaccgcggcgagattgcattgcgtattcttcgtgcctgtaaagaactgggcatcaagactgtcgctgtgcactccagcgcggatcgcgatctaaaacacgtattactggcagatgaaacggtctgtattggccctgctccgtcagtaaaaagttatctgaacatcccggcaatcatcagcgccgctgaaatcaccggcgcagtagcaatccatccgggttacggcttcctctccgagaacgccaactttgccgagcaggttgaacgctccggctttatcttcattggcccgaaagcagaaaccattcgcctgatgggcgacaaagtatccgcaatcgcggcgatgaaaaaagcgggcgtcccttgcgtaccgggttctgacggcccgctgggcgacgatatggataaaaaccgtgccattgctaaacgcattggttatccggtgattatcaaagcctccggcggcggcggcggtcgcggtatgcgcgtagtgcgcggcgacgctgaactggcacaatccatctccatgacccgtgcggaagcgaaagctgctttcagcaacgatatggtttacatggagaaatacctggaaaatcctcgccacgtcgagattcaggtactggctgacggtcagggcaacgctatctatctggcggaacgtgactgctccatgcaacgccgccaccagaaagtggtcgaagaagcgccagcaccgggcattaccccggaactgcgtcgctacatcggcgaacgttgcgctaaagcgtgtgttgatatcggctatcgcggtgcaggtactttcgagttcctgttcgaaaacggcgagttctatttcatcgaaatgaacacccgtattcaggtagaacacccggttacagaaatgatcaccggcgttgacctgatcaaagaacagctgcgtatcgctgccggtcaaccgctgtcgatcaagcaagaagaagttcacgttcgcggccatgcggtggaatgtcgtatcaacgccgaagatccgaacaccttcctgccaagtccgggcaaaatcacccgtttccacgcacctggcggttttggcgtacgttgggagtctcatatctacgcgggctacaccgtaccgccgtactatgactcaatgatcggtaagctgatttgctacggtgaaaaccgtgacgtggcgattgcccgcatgaagaatgcgctgcaggagctgatcatcgacggtatcaaaaccaacgttgatctgcagatccgcatcatgaatgacgagaacttccagcatggtggcactaacatccactatctggagaaaaaactcggtcttcaggaaaaataa

SEQ ID NO: 322 - protein, 449 aa, Escherichia coli
MLDKIVIANRGEIALRILRACKELGIKTVAVHSSADRDLKHVLLADETVCIGPAPSVKSYLNIPAIISAAEITGAVAIHPGYGFLSENANFAEQVERSGFIFIGPKAETIRLMGDKVSAIAAMKKAGVPCVPGSDGPLGDDMDKNRAIAKRIGYPVIIKASGGGGGRGMRVVRGDAELAQSISMTRAEAKAAFSNDMVYMEKYLENPRHVEIQVLADGQGNAIYLAERDCSMQRRHQKVVEEAPAPGITPELRRYIGERCAKACVDIGYRGAGTFEFLFENGEFYFIEMNTRIQVEHPVTEMITGVDLIKEQLRIAAGQPLSIKQEEVHVRGHAVECRINAEDPNTFLPSPGKITRFHAPGGFGVRWESHIYAGYTVPPYYDSMIGKLICYGENRDVAIARMKNALQELIIDGIKTNVDLQIRIMNDENFQHGGTNIHYLEKKLGLQEK

SEQ ID NO: 323 - DNA, 1608 bp, Brassica napus
atggacgcctcaatgattactaattgcaaatccactgcctcccttccctctttgttcctggggagatcgggaggtagtcttagaagctcccagtgtaatgtcatgatggggaaaaccattaccttcccgagccaaaagactcagactttgaaggttagccggaagaacgtgaataggaggtgtggtggtggtgcgcttggtgctacctgcagtggggataagattcttgtggctaacagaggtgaaattgctgtccgtgtgatccgaactgctcatgagatggggattccttgtgttgctgtttactcaaccatcgacaaggatgcattgcatgtcaaattggctgatgaagctgtttgtattggtgaagctcctagcaaccagtcgtatttggtgataccgaatgttctgtcagctgcaattagccgaggatgcacaatgcttcatcctggatatggtttcctttcagagaacgctctttttgttgagatgtgcagagagcacaggatcaactttattggaccaaatcctgatagcatccgtgtcatgggtgacaaatcaactgctagagagacaatgaagaatgcaggtgtcccaactgtaccagggagtgatggactattaaagagcacagaagaaggagtcaagctcgccaatgagattgggttccctgtgatgatcaaggcaacagctggtggtggtggacgtggaatgcgtcttgctaatgaaccgtcagagtttgtgaaactgctgcaggcagcaaagagtgaggccgcggctgcttttggaaatgatggagtttatctggagaagtacgtccaaaatccccgccatattgagttccagattcttgcagataaatttggaaatgttgttcacttcggcgagcgtgactgcagcatccagagacggaaccaaaagttgctggaagaagcaccttctcccgcactgacccctgagctgcgtaaagccatgggtgatgcagcagtggcagcagcagcgtccattggttacattggtgttggtaccgtggagtttcttttggatgagagaggttccttctatttcatggaaatgaacactagaatccaggtggagcaccctgtgacggagatgatttactccgttgatttgattgaagaacagattcgtgttgcaatgggagagaaactgcgttatacacaggatgagattgtgcttaggggacattctattgaatgtcgtatcaatgcagaagacccatttaaaggattcagacctggacctggaaggataacatcgtatctgccatctggaggtccttttgtcaggatggatagccatgtgtatcccgactatgttgttcctccaagctatgactctcttcttggaaagcttattgtatgggctccaacgagggaaagggcaattgagcggatgaaacgtgcacttaatgacactattattacaggggttcccaccaccattgagtaccacaaacttatccttgaagttgaggatttcaagaacggaaaagttgacactgcattcatccccaagcatgaagaggaattagcagagcctcatgaaattgtgctagtgaaagatttgacaaatgcagctgcttag

SEQ ID NO: 324 - protein, 535 aa, Brassica napus
MDASMITNCKSTASLPSLFLGRSGGSLRSSQCNVMMGKTITFPSQKTQTLKVSRKNVNRRCGGGALGATCSGDKILVANRGEIAVRVIRTAHEMGIPCVAVYSTIDKDALHVKLADEAVCIGEAPSNQSYLVIPNVLSAAISRGCTMLHPGYGFLSENALFVEMCREHRINFIGPNPDSIRVMGDKSTARETMKNAGVPTVPGSDGLLKSTEEGVKLANEIGFPVMIKATAGGGGRGMRLANEPSEFVKLLQAAKSEAAAAFGNDGVYLEKYVQNPRHIEFQILADKFGNVVHFGERDCSIQRRNQKLLEEAPSPALTPELRKAMGDAAVAAAASIGYIGVGTVEFLLDERGSFYFMEMNTRIQVEHPVTEMIYSVDLIEEQIRVAMGEKLRYTQDEIVLRGHSIECRINAEDPFKGFRPGPGRITSYLPSGGPFVRMDSHVYPDYVVPPSYDSLLGKLIVWAPTRERAIERMKRALNDTIITGVPTTIEYHKLILEVEDFKNGKVDTAFIPKHEEELAEPHEIVLVKDLTNAAA

SEQ ID NO: 325 - DNA, 2199 bp, Glycine max
atggcttctctggcgttgctccgcagaaagcttatcatcaccagaaccacactctcctactcgcacgtgcgcgcacgagccttctccgcgggaaacaacaaacaccgcatcgagaagattctagtagccaaccgcggcgaaatcgcttgcaggatcacgcggaccgcgcggaggctcggcattcaaaccgtcgccgtttacagcgacgccgacagggattcgctccacgtggcaaccgccgacgaggccattcgaatcggaccgccgccggcgcggctcagttacttgaacggagcctccatcgtcgacgccgcaattcgctccggcgcgcaggctattcaccctgggtatggattcttgtcggagagtgctgacttcgccaagctctgtgaggagagtggtctcacttttatagggcctcctgcgtctgctattcgagatatgggtgacaagagtgcatcgaagagaataatgggagctgcaggtgtgcctcttgtacctggatatcacggatatgatcaagatattgaaaaaatgaagttggaagctgatagaattggatatccagtcctaattaagccaactcatggtggaggtggaaagggtatgaggattgtacacactccagatgagtttgttgaatccttcttagctgcacaacgggaagcagctgcttcttttggcgtcaacacaatattgttggagaagtatattacacggccaagacacatagaagtccagatatttggcgataagcatgggaatgttctgcatttgtatgagcgagattgcagtgttcagagaagacaccaaaaaataattgaagaagctccagctccaaacatttctgctgactttcgtgcacaattgggtgtagccgctgtttcagctgcaaaggcagttaattattacaatgctgggactgtggagtttatagttgatacagtctctgatgaattttactttatggagatgaatacacgtcttcaggttgagcatcctgttacagaaatgattgttggtcaggatcttgttgaatggcaaatccttgttgccaatggagaagctcttccattgagtcaatcacaagtacccttatcaggtcatgcttttgaagctcgaatctatgctgaaaatgttcaaaaagggtttcttccagcaactggagttctacaccattatcatgttccagtctcatctgcagtccgagtggagactggagttaaagaaggagacaaagttagcatgcactatgatcctatgattgctaagcttgtggtgtggggagaaaatcgtgctgctgccttggtcaaactcaaggatagtctgtcaaagtttcaggttgcaggtctgccaaccaatgtcaactttcttcaaaagcttgctaatcacagggcatttgcaaatggcaatgtggagactcattttattgataactacaaagaagacctctttgttgatgctaacaattcagtgtctgtgaaagaagcatatgaagctgctagacttaatgcatccctggtggccgcatgcctcattgaaaaagagcatttcatattggctagaaatccacctggcttgctccctatatggtattcttctccacctttcagaatccatcatcaagctaagcgtagaatggaacttgagtgggataatgaatatggtagtggtagctcaaagatcatgaagcttaccatcacttatcagcctgatgggagatacctaattgagacaggacaaaatggatctcctgttttagaagtgaaatcaacatatgtaaaagataactattttagagttgaagctgctggtgtaatcaatgatgttaatgtagctgtttattcaaaggatcaaataaggcatattcatatttggcaagggtcctgtcatcattatttcagagagaaactaggcctggagctgtctgaggatgaagaatcccaacataaacccaaagttgaaacatcagccaaccctcaagggacagttgtagcacccatggcaggcttggtagttaaggttctagtggagaacaagacaagagtggaggaaggacaacctgtgttagtattggaagcaatgaagatggagcatgttgtaaaggcaccttcttctggctatgtgcatgggcttcaacttatggtgggtgaacaggtttcagatggcagtgttcttttcagtgtaaaggatcaataa

SEQ ID NO: 326 - protein, 732 aa, Glycine max
MASLALLRRKLIITRTTLSYSHVRARAFSAGNNKHRIEKILVANRGEIACRITRTARRLGIQTVAVYSDADRDSLHVATADEAIRIGPPPARLSYLNGASIVDAAIRSGAQAIHPGYGFLSESADFAKLCEESGLTFIGPPASAIRDMGDKSASKRIMGAAGVPLVPGYHGYDQDIEKMKLEADRIGYPVLIKPTHGGGGKGMRIVHTPDEFVESFLAAQREAAASFGVNTILLEKYITRPRHIEVQIFGDKHGNVLHLYERDCSVQRRHQKIIEEAPAPNISADFRAQLGVAAVSAAKAVNYYNAGTVEFIVDTVSDEFYFMEMNTRLQVEHPVTEMIVGQDLVEWQILVANGEALPLSQSQVPLSGHAFEARIYAENVQKGFLPATGVLHHYHVPVSSAVRVETGVKEGDKVSMHYDPMIAKLVVWGENRAAALVKLKDSLSKFQVAGLPTNVNFLQKLANHRAFANGNVETHFIDNYKEDLFVDANNSVSVKEAYEAARLNASLVAACLIEKEHFILARNPPGLLPIWYSSPPFRIHHQAKRRMELEWDNEYGSGSSKIMKLTITYQPDGRYLIETGQNGSPVLEVKSTYVKDNYFRVEAAGVINDVNVAVYSKDQIRHIHIWQGSCHHYFREKLGLELSEDEESQHKPKVETSANPQGTVVAPMAGLVVKVLVENKTRVEEGQPVLVLEAMKMEHVVKAPSSGYVHGLQLMVGEQVSDGSVLFSVKDQ

SEQ ID NO: 327 - DNA, 1620 bp, Glycine max
atggaagtcacactttcagcctgcaagtccgttagctcgccttctgttcccgtcgcaggtttgtttgcggggaatggaggaattaagagctcgcaatgcagtttcttagcgggagcgagcaaagtgaggtttcctaggcaagtaggtcaagttagccaccttcgcaaacagcgccaaacgcgtcactgcggtgctctccacgcgacttgcagcggtgacaagatcctgatcgcgaacagaggcgagattgccgtccgcgttattcgaaccgctcatgaattggggattccttgtgtggctgtgtactccaccatcgacaaggacgcgcttcatgtcaaattggctgatgaagccgtttgcatcggggaagcgccgagtagccagtcctacttgctgatcccgaatgttctgtcagctgctattagccgcagatgcaccatgttgcatcctggctatggttttcttgcggagaatgcagtgtttgttgaaatgtgcagagaacatggaatcaactttattgggcctaaccctgacagtattcgggttatgggtgacaaagcaactgccagagagacaatgaagaaagcaggtgttcccaccgttccgggaagtgatggccttttacagagcacagaagaagctatcagactggcaaatgagattggtttccctgtgatgatcaaggcaacagctggtggtggaggacgtggcatgcgtcttgctaaagaacctgctgagtttgtgaagtttttacagcaagctaagagtgaggcagctgctgcatttggcaatgatggggtttatttggagaagtacattcaaaacccaaggcacattgagttccaggttcttgcagataaatatggtaatgttgttcactttggagaacgtgattgcagcattcagaggcgcaaccagaaactgcttgaagaagcaccatctcctgccctgacccctgagttgcgaaaggcaatgggagatgcagcagttgcagctgctgcatctattggttacataggtgttggaacggttgagttccttttggatgaaagaggttccttttactttatggagatgaacactcgtatccaggttgagcatccggtgacagaaatgatttcctcaacggatttgatagaagagcaaattcgtgtagctatgggagaaaaacttcgatacaaacaggaggatattgtcctcagaggacattctattgaatgccgtatcaatgcagaagatgcttttaagggatttagaccagggccaggtagaattactgcatacttgccatccggaggtccatttgttagaatggatagccatgtttatcctgattatgtggttcctccaagctatgattcccttcttggaaagctgattgtatgggctccaactagagaaaaagcaattgaacgcatgaaaagggcacttgatgatactattatcacaggagttcctactacaattgattatcataaacttatccttgacatagaggatttcagaaatggcaaggttgatactgcttttattccaaaacacgaggaagagttggcaatgccaccgcagaagatggtactcgctaacagggtgaatgaactagctggttcaactgcctga

SEQ ID NO: 328 - protein, 539 aa, Glycine max
MEVTLSACKSVSSPSVPVAGLFAGNGGIKSSQCSFLAGASKVRFPRQVGQVSHLRKQRQTRHCGALHATCSGDKILIANRGEIAVRVIRTAHELGIPCVAVYSTIDKDALHVKLADEAVCIGEAPSSQSYLLIPNVLSAAISRRCTMLHPGYGFLAENAVFVEMCREHGINFIGPNPDSIRVMGDKATARETMKKAGVPTVPGSDGLLQSTEEAIRLANEIGFPVMIKATAGGGGRGMRLAKEPAEFVKFLQQAKSEAAAAFGNDGVYLEKYIQNPRHIEFQVLADKYGNVVHFGERDCSIQRRNQKLLEEAPSPALTPELRKAMGDAAVAAAASIGYIGVGTVEFLLDERGSFYFMEMNTRIQVEHPVTEMISSTDLIEEQIRVAMGEKLRYKQEDIVLRGHSIECRINAEDAFKGFRPGPGRITAYLPSGGPFVRMDSHVYPDYVVPPSYDSLLGKLIVWAPTREKAIERMKRALDDTIITGVPTTIDYHKLILDIEDFRNGKVDTAFIPKHEEELAMPPQKMVLANRVNELAGSTA

SEQ ID NO: 329 - DNA, 471 bp, Escherichia coli
atggatattcgtaagattaaaaaactgatcgagctggttgaagaatcaggcatctccgaactggaaatttctgaaggcgaagagtcagtacgcattagccgtgcagctcctgccgcaagtttccctgtgatgcaacaagcttacgctgcaccaatgatgcagcagccagctcaatctaacgcagccgctccggcgaccgttccttccatggaagcgccagcagcagcggaaatcagtggtcacatcgtacgttccccgatggttggtactttctaccgcaccccaagcccggacgcaaaagcgttcatcgaagtgggtcagaaagtcaacgtgggcgataccctgtgcatcgttgaagccatgaaaatgatgaaccagatcgaagcggacaaatccggtaccgtgaaagcaattctggtcgaaagtggacaaccggtagaatttgacgagccgctggtcgtcatcgagtaa

SEQ ID NO: 330 - protein, 156 aa, Escherichia coli
MDIRKIKKLIELVEESGISELEISEGEESVRISRAAPAASFPVMQQAYAAPMMQQPAQSNAAAPATVPSMEAPAAAEISGHIVRSPMVGTFYRTPSPDAKAFIEVGQKVNVGDTLCIVEAMKMMNQIEADKSGTVKAILVESGQPVEFDEPLVVIE

SEQ ID NO: 331 - DNA, 849 bp, Brassica napus
atggcgtcttcttcgttctccgtcacgtctccggctgctgcttccgtcacccaaacgtcttcacacttacctctcccaaccacacgctctcgtctcttccctcgcagagtttccttccatctctccgccaagcctaagctccgctttctctccaagcctagtcgtggtagctaccctgtggtcaaagcccaatctaacaaggttggtagtggtgcgtcatcaaatgcttcagctcctacaaaaactgatgagccagaatcagatgaaggaaaggatagaaactcttcttcttcgactgatttagctacagaagagtctatctctgagttccttacccaagtcacaactcttgtcaagcttgtggattcgagagacattgtcgagttgcagttgaaacaactcgactgtgaacttgtcattcgaaagaaggaagctttgccacaacccgagtccccccctgcgcaatatgttatgatgcagcaaccaaaccaatcatcttatgtgcaatcagtggctcctcctcctcctccttctgcacctgctgcatcacctgcaccttctgctccagcttctttgccttcaccatctccacctgctccagctaaatcatcgcttcctactgttaaaagccctatggctggcacattctaccgtagtccaggacctggtgaaccaccctttatcaaggttggagacaaagtgcagaagggacaagttctatgcatcgttgaagccatgaaattgatgaatgaaatagagtctgaccaaacgggaaccgtagtggatatcgttgcagaagatggcaagcctgttagcctcgacactcctctgtttgtggttcaaccgtag

SEQ ID NO: 332 - protein, 282 aa, Brassica napus
MASSSFSVTSPAAASVTQTSSHLPLPTTRSRLFPRRVSFHLSAKPKLRFLSKPSRGSYPVVKAQSNKVGSGASSNASAPTKTDEPESDEGKDRNSSSSTDLATEESISEFLTQVTTLVKLVDSRDIVELQLKQLDCELVIRKKEALPQPESPPAQYVMMQQPNQSSYVQSVAPPPPPSAPAASPAPSAPASLPSPSPPAPAKSSLPTVKSPMAGTFYRSPGPGEPPFIKVGDKVQKGQVLCIVEAMKLMNEIESDQTGTVVDIVAEDGKPVSLDTPLFVVQP

SEQ ID NO: 333 - DNA, 759 bp, Brassica napus
atggcgtcattgtctgtaccttacgccaagatctctgccccaaaccgtcgggttggatctattcctggaagaacccgatggcagccgcaactcaatggcgtctcctttccttccgatgtatctcagaatcaatctacaatctggaggttgcgtgcgacaaccaacgaggttgtctctaactctaccccagtgactaacggtgggtgcttgaacgggaacgtgaagagcaatgttcctgaatccgctaaactctctaactttatggctaaagtttcaggtcttcttaagcttgtggattcaagagatatagtggaacttgaacttaagcagctcgactgtgagattgttattcgaaagaaggaagctttagctgcaccaccagctccagtctatcactctatgcctcctccaatggcaggctttccaatggctccatctcatccagttgctcctcctcctttttctcctagtccctcctcagcccctgaaacagcaaaaccagtaaccccaccttcctcttcacatcctccactcaagagtcctatggctggtactttctacagatctcctggtcctggtgaacctccttttgtcaaggttggagataaggtgcagaagggtcaagttgtttgcattattgaagctatgaaactgatgaatgagattgaggctgagaaatcaggaaccatcactgaactactagctgaagatggaaaaccggttagcgttgacacgcctctgtttaccatcgtgccttga

SEQ ID NO: 334 - protein, 252 aa, Brassica napus
MASLSVPYAKISAPNRRVGSIPGRTRWQPQLNGVSFPSDVSQNQSTIWRLRATTNEVVSNSTPVTNGGCLNGNVKSNVPESAKLSNFMAKVSGLLKLVDSRDIVELELKQLDCEIVIRKKEALAAPPAPVYHSMPPPMAGFPMAPSHPVAPPPFSPSPSSAPETAKPVTPPSSSHPPLKSPMAGTFYRSPGPGEPPFVKVGDKVQKGQVVCIIEAMKLMNEIEAEKSGTITELLAEDGKPVSVDTPLFTIVP

SEQ ID NO: 335 - DNA, 1242 bp, Escherichia coli
atgtctaagcgtcgtgtagttgtgaccggactgggcatgttgtctcctgtcggcaataccgtagagtctacctggaaagctctgcttgccggtcagagtggcatcagcctaatcgaccatttcgatactagcgcctatgcaacgaaatttgctggcttagtaaaggattttaactgtgaggacattatctcgcgcaaagaacagcgcaagatggatgccttcattcaatatggaattgtcgctggcgttcaggccatgcaggattctggccttgaaataacggaagagaacgcaacccgcattggtgccgcaattggctccgggattggcggcctcggactgatcgaagaaaaccacacatctctgatgaacggtggtccacgtaagatcagcccattcttcgttccgtcaacgattgtgaacatggtggcaggtcatctgactatcatgtatggcctgcgtggcccgagcatctctatcgcgactgcctgtacttccggcgtgcacaacattggccatgctgcgcgtattatcgcgtatggcgatgctgacgtgatggttgcaggtggcgcagagaaagccagtacgccgctgggcgttggtggttttggcgcggcacgtgcattatctacccgcaatgataacccgcaagcggcgagccgcccgtgggataaagagcgtgatggtttcgtactgggcgatggtgccggtatgctggtacttgaagagtacgaacacgcgaaaaaacgcggtgcgaaaatttacgctgaactcgtcggctttggtatgagcagcgatgcttatcatatgacgtcaccgccagaaaatggcgcaggcgcagctctggcgatggcaaatgctctgcgtgatgcaggcattgaagcgagtcagattggctacgttaacgcgcacggtacttctacgccggctggcgataaagctgaagcgcaggcggtgaaaaccatcttcggtgaagctgcaagccgtgtgttggtaagctccacgaaatctatgaccggtcacctgttaggtgcggcgggtgcagtagaatctatctactccatcctggcgctgcgcgatcaggctgttccgccaaccatcaacctggataacccggatgaaggttgcgatctggatttcgtaccgcacgaagcgcgtcaggttagcggaatggaatacactctgtgtaactccttcggcttcggtggcactaatggttctttgatctttaaaaagatctaa

SEQ ID NO: 336 - protein, 413 aa, Escherichia coli
MSKRRVVVTGLGMLSPVGNTVESTWKALLAGQSGISLIDHFDTSAYATKFAGLVKDFNCEDIISRKEQRKMDAFIQYGIVAGVQAMQDSGLEITEENATRIGAAIGSGIGGLGLIEENHTSLMNGGPRKISPFFVPSTIVNMVAGHLTIMYGLRGPSISIATACTSGVHNIGHAARIIAYGDADVMVAGGAEKASTPLGVGGFGAARALSTRNDNPQAASRPWDKERDGFVLGDGAGMLVLEEYEHAKKRGAKIYAELVGFGMSSDAYHMTSPPENGAGAALAMANALRDAGIEASQIGYVNAHGTSTPAGDKAEAQAVKTIFGEAASRVLVSSTKSMTGHLLGAAGAVESIYSILALRDQAVPPTINLDNPDEGCDLDFVPHEARQVSGMEYTLCNSFGFGGTNGSLIFKKI

SEQ ID NO: 337 - DNA, 1221 bp, Glycine max
atgggtcttgtgtcagtctttggtagtgacgttgatgccttttacaacaagcttcttgagggagaaagtgggataagcctaatagataggtttgatgcctcaaacttctcggtccgttttggaggtcagatacgtgatttctcttcagaaggctacattgatggcaagaatgaccggcgccttgacaattgctggaggtattgcattgttgcaggcaagagggcccttgatgatgccaaccttggaaagcaagtccttgacactatggacaaaacaagaataggagttctggtgggatcaggaatgggaggtataacggctttctcgaatggtgtggaagctcttgtacaaaagggatataagaaaattactccatttttcattccctactccatcaccaacatgggttctgccttgttggctatagacacaggcctaatgggtcccaattattcaatttccactgcttgtgcaacggcaaattactgcttttgtgcggctgctaatcacattagaaaaggcgaagcagatatcatggtggttggtggaactgaggctgcaatcatgcctagtggtcttggaggcttcattgcttgcagggctttgtctcacagaaacgaagaccccaagaaggcttcaagaccatgggacaaagatcgtgatggttttgtgatgggtgaaggctctggtgtgctggtaatggagagcttggagagtgcaacaaaaaggggagccaaaataatagcagaatatttggggggtgccataacgtgtgatgctcatcacatgactgatccaagagctgatggtcttggagtttcatcttgcataagcaagagtttagaagatgctggagtttctcctgaagaggtgaactatgtgaatgctcatgccacgtcaacactggctggtgacttggctgaggttaatgcaattaaaaaggtttttaaggacacatcagaattgaaaatgaatgcaactaagtcaatgattggtcatggtcttggggctgctggtggtttggaagccatagcaactatcaaagccataacaactggctggttgcatccaagcattaacctagataacttggaggctagtgttacaattgacactgtccctaacgttaagaagaagcatgaagttaatgttggtatatccaactcatttggattcggtggacacaattcagtagttgtctttgccccattcaggccatga

SEQ ID NO: 338 - protein, 406 aa, Glycine max
MGLVSVFGSDVDAFYNKLLEGESGISLIDRFDASNFSVRFGGQIRDFSSEGYIDGKNDRRLDNCWRYCIVAGKRALDDANLGKQVLDTMDKTRIGVLVGSGMGGITAFSNGVEALVQKGYKKITPFFIPYSITNMGSALLAIDTGLMGPNYSISTACATANYCFCAAANHIRKGEADIMVVGGTEAAIMPSGLGGFIACRALSHRNEDPKKASRPWDKDRDGFVMGEGSGVLVMESLESATKRGAKIIAEYLGGAITCDAHHMTDPRADGLGVSSCISKSLEDAGVSPEEVNYVNAHATSTLAGDLAEVNAIKKVFKDTSELKMNATKSMIGHGLGAAGGLEAIATIKAITTGWLHPSINLDNLEASVTIDTVPNVKKKHEVNVGISNSFGFGGHNSVVVFAPFRP

SEQ ID NO: 339 - DNA, 1386 bp, Zea mays
atgcagagcctcctcgtgcccactgctgcatcggccccggtggcggctccgcgggctcggcggaatctccctatgcgcctctccgtccgcgcctccgcgacggcggcagcggcaccgcggcgggagacggatcccaagaagcgggtggtgatcacggggatggggttggtctccgtgttcgggaacgacgtagacgcttactacgaccgcctgctagccggggagagcggcatcgggcccatcgaccgcttcgacgcctctaagttccccacccgcttcgccggccagatccggggcttctcgtccgagggctacatcgacggaaagaacgaccgccgcctcgacgactgcctccgatactgcatcgtcagtggcaagaaggctctcgaggctgccggtattgcccacggctccaagcccatggaaaagattgacaaaacccgggctggtgtgcttgtgggcactggtatgggtggcctcacggtgttttctgatggtgttcagaatctcattgagaagggctacagaaaaataactcctttcttcatcccatatgctataacaaacatgggttctgccctgcttggaatggatattggtttcatgggtccaaactactccatctcaactgcctgtgctacctcgaactactgtttctatgctgcagcaaaccatatccgtagaggcgaagcggatataatgatagctggaggcactgaagctgcaattattccaattggtgttggtggctttgttgcatgtagagcactgtcacagaggaatgatgaccctaaaacagcatccaggccttgggacaaggatcgtgatggttttgtcatgggtgaaggagctggagtcctggtcatggagagcctagagcatgcaattaaacgtgatgcaccaataattgcggagtatttaggaggtgctgtgaactgtgatgcttaccatatgactgacccgagatctgatggtcttggtgtttcatcttgcatcaagcaaagtctcgaagatgctggtgtggctcctgaggaggtcaactatattaatgctcatgcaacatcaacccttgctggtgatctggcagaggtgaatgccatcaagcaagtcttcaaggacccatctgggatcaaaataaatgcaaccaagtccatgataggacattgccttggtgcagcaggtggtttggaagccattgctactgtcaaagcgataactactggatgggtgcatccaagcataaaccaatttaacccagaggaagcggttgaattcgacacagtacctaatgtaaaaaagcagcatgaagtgaacgttggcatctcaaattcttttggatttggaggtcacaattctgtcgtagtatttgcgccatttaagccataa

SEQ ID NO: 340 - protein, 461 aa, Zea mays
MQSLLVPTAASAPVAAPRARRNLPMRLSVRASATAAAAPRRETDPKKRVVITGMGLVSVFGNDVDAYYDRLLAGESGIGPIDRFDASKFPTRFAGQIRGFSSEGYIDGKNDRRLDDCLRYCIVSGKKALEAAGIAHGSKPMEKIDKTRAGVLVGTGMGGLTVFSDGVQNLIEKGYRKITPFFIPYAITNMGSALLGMDIGFMGPNYSISTACATSNYCFYAAANHIRRGEADIMIAGGTEAAIIPIGVGGFVACRALSQRNDDPKTASRPWDKDRDGFVMGEGAGVLVMESLEHAIKRDAPIIAEYLGGAVNCDAYHMTDPRSDGLGVSSCIKQSLEDAGVAPEEVNYINAHATSTLAGDLAEVNAIKQVFKDPSGIKINATKSMIGHCLGAAGGLEAIATVKAITTGWVHPSINQFNPEEAVEFDTVPNVKKQHEVNVGISNSFGFGGHNSVVVFAPFKP

SEQ ID NO: 341 - DNA, 1221 bp, Glycine max
atgggcctcgcgtcggtgttcggtaacgacgtggagggttactacgagaagctcctcgccggcgagagcggcatcaccgccatcgaccgcttcgacgcctccaagttccccacgcgtttcggcggccagatccgcggcttctctgccgagggctacatcgacggcaagaacgaccgccgcctcgacgactgcctccgctactgcattgtcgccggcaaaaaggccctcgaaaacgccgaccttgcccccgacaaccactccaagattgataaggagcgtgctggtgttcttgtaggctccggaatgggaggtttaacggtgttttctgacggtgttcaggctctgattgagaaggggcacaggaagataacgccgttttttattccgtatgccattactaacatgggttcggctttgcttgggatagaccttgggttcatgggtcccaactactctatatccacggcttgtgctacctccaactattgcttttatgctgcggcgaaccatattcggagaggggaggctgatttgatgattgccggtgggactgaggctgccattattccaattgggttagggggttttgttgcttgcagggcgctttctcagaggaatgatgaccctaaaaccgcttccaggccatgggataaggaacgtgatggctttgttatgggtgaaggtgctggagttttggtaatggagagcttggagcatgctatgaagcgaggcgcacctattattgctgaatatttgggaggagctgttaactgtgatgcttatcacatgactgatccaaggtctgatggacttggtgtgtctacatgcattcagagcagccttgaagatgccggtgtgtcaccagaggaggtcaactacataaatgcacatgcaacttccactcttgctggagacttggcagagatcaatgctattaaaaaggttttcaaggacacttctggaatcaaaattaatgcaaccaagtctatgatagggcactgccttggtgcagctgggggtttggaagccattgccacagtgaaagccataacaacaggatggctgcatccaacaatcaatcaatttaacccagaacctgcagttgattttgatacagtggcaaatgtcaagcagcagcatgaaatcaacgttgccatttcaaattcatttggattcggtggacacaactctgtggtagcattttctgctttcaggccttga

SEQ ID NO: 342 - protein, 406 aa, Glycine max
MGLASVFGNDVEGYYEKLLAGESGITAIDRFDASKFPTRFGGQIRGFSAEGYIDGKNDRRLDDCLRYCIVAGKKALENADLAPDNHSKIDKERAGVLVGSGMGGLTVFSDGVQALIEKGHRKITPFFIPYAITNMGSALLGIDLGFMGPNYSISTACATSNYCFYAAANHIRRGEADLMIAGGTEAAIIPIGLGGFVACRALSQRNDDPKTASRPWDKERDGFVMGEGAGVLVMESLEHAMKRGAPIIAEYLGGAVNCDAYHMTDPRSDGLGVSTCIQSSLEDAGVSPEEVNYINAHATSTLAGDLAEINAIKKVFKDTSGIKINATKSMIGHCLGAAGGLEAIATVKAITTGWLHPTINQFNPEPAVDFDTVANVKQQHEINVAISNSFGFGGHNSVVAFSAFRP

SEQ ID NO: 343 - DNA, 735 bp, Escherichia coli
atgaattttgaaggaaaaatcgcactggtaaccggtgcaagccgcggaattggccgcgcaattgctgaaacgctcgcagcccgtggcgcgaaagttattggcactgcgaccagtgaaaatggcgctcaggcgatcagtgattatttaggtgccaacggcaaaggtctgatgttgaatgtgaccgacccggcatctatcgaatctgttctggaaaaaattcgcgcagaatttggtgaagtggatatcctggtcaataatgccggtatcactcgtgataacctgttaatgcgaatgaaagatgaagagtggaacgatattatcgaaaccaacctttcatctgttttccgtctgtcaaaagcggtaatgcgcgctatgatgaaaaagcgtcatggtcgtattatcactatcggttctgtggttggtaccatgggaaatggcggtcaggccaactacgctgcggcgaaagcgggcttgatcggcttcagtaaatcactggcgcgcgaagttgcgtcacgcggtattactgtaaacgttgttgctccgggctttattgaaacggacatgacacgtgcgctgagcgatgaccagcgtgcgggtatcctggcgcaggttcctgcgggtcgcctcggcggcgcacaggaaatcgccaacgcggttgcattcctggcatccgacgaagcagcttacatcacgggtgaaactttgcatgtgaacggcgggatgtacatggtctaa

SEQ ID NO: 344 - protein, 244 aa, Escherichia coli
MNFEGKIALVTGASRGIGRAIAETLAARGAKVIGTATSENGAQAISDYLGANGKGLMLNVTDPASIESVLEKIRAEFGEVDILVNNAGITRDNLLMRMKDEEWNDIIETNLSSVFRLSKAVMRAMMKKRHGRIITIGSVVGTMGNGGQANYAAAKAGLIGFSKSLAREVASRGITVNVVAPGFIETDMTRALSDDQRAGILAQVPAGRLGGAQEIANAVAFLASDEAAYITGETLHVNGGMYMV

SEQ ID NO: 345 - DNA, 744 bp, Synechocystis PCC6803
atgacggcattaacggcacaggtggcattggtaacgggggcatcccggggtattggtaaagcgacggctttggccctggccgccacgggcatgaaagtggtagtgaactatgctcaatccagtacggccgccgatgctgtggtagcggaaattattgccaacgggggagaggcgatcgccgtgcaggccaatgtggctaatgctgacgaagtggatcaactgattaaaaccacgctggataaatttagtcgcatcgatgtgttagtgaacaatgctggcattaccagggatacgctgttgttgagaatgaaactggaagattggcaagcggtcattgacttgaatttaaccggggtgtttctttgcaccaaagcggtgtctaagttaatgctcaagcaaaaaagtgggcgtatcattaacatcacttctgtagcgggcatgatggggaatccggggcaagctaactacagcgccgctaaggctggggtaattggttttactaaaaccgttgccaaagagttggccagtcggggggtaactgtcaatgccgtagctcctggtttcattgccacggatatgacggaaaatctcaatgcagagccaattttgcaatttattcccctggctcgctatggtcaaccggaggaagtggcgggcaccatccgttttttagccacagatccagcagcggcctatatcacgggacaaacatttaatgtggatggcggcatggtaatgttctaa

SEQ ID NO: 346 - protein, 247 aa, Synechocystis PCC6803
MTALTAQVALVTGASRGIGKATALALAATGMKVVVNYAQSSTAADAVVAEIIANGGEAIAVQANVANADEVDQLIKTTLDKFSRIDVLVNNAGITRDTLLLRMKLEDWQAVIDLNLTGVFLCTKAVSKLMLKQKSGRIINITSVAGMMGNPGQANYSAAKAGVIGFTKTVAKELASRGVTVNAVAPGFIATDMTENLNAEPILQFIPLARYGQPEEVAGTIRFLATDPAAAYITGQTFNVDGGMVMF

SEQ ID NO: 347 - DNA, 762 bp, Brassica napus
atgacagctcttgtaaccggtggaaccaagggaattgggtatgcgatagtggaggaacttgctggttttggtgcaagagttcacacgtgtgctagagaccaaactctgcttgatgaatgtttaagtgaatggaaagagaaagggtttcaagtcactggctcagtctgtgatgtatcctctcgacctcagagagatgagttgatgaagacggtctcttctctattcagtggcaaactcaacatccttatcaacaatgttggtacccttgtgtcaaagccgactacagagtttacagcacaagatttctcaggtcaaatagctaccaatttggattctgcttatcacttctctcaattggcccatcctttacttaaggcatctggatttggtagcattgtgttcatgtcttcagtatgtggggttgtatcagccggtaccgtatccatatacagcttaacaaaaggaggcatgaatcaattggcaagaaacttggcatgtgaatgggcaagtgatggcataagggctaactctgtagctccttggatgacaaaaactcctcttgcccaagatcgtcttgatgacgagaaattcgcggaggctatcttctcaagaactccattaggtcgtgcgtgtgagccgcgtgaggttgcctcgttggttacctttctttgtctccctgcagcttcttatataacaggacaaaccatttgtattgatggaggtttcactgttaatggcttctcctacaagccagaggtttga

SEQ ID NO: 348 - protein, 253 aa, Brassica napus
MTALVTGGTKGIGYAIVEELAGFGARVHTCARDQTLLDECLSEWKEKGFQVTGSVCDVSSRPQRDELMKTVSSLFSGKLNILINNVGTLVSKPTTEFTAQDFSGQIATNLDSAYHFSQLAHPLLKASGFGSIVFMSSVCGVVSAGTVSIYSLTKGGMNQLARNLACEWASDGIRANSVAPWMTKTPLAQDRLDDEKFAEAIFSRTPLGRACEPREVASLVTFLCLPAASYITGQTICIDGGFTVNGFSYKPEV

SEQ ID NO: 349 - DNA, 732 bp, Brassica napus
atgtttgggtatgccatagtagaagagttagctagttttggagctagaatccatgtatgcgacatatctaaaactttgctcaatcaaagtttaagcgaatgggaaaagaaagggtttcaagtgagtggctcagtctgtgatgtaacctctcgtcctgagggagaaactttgatacaaaaagtctcctcgctgtttgatggcaagctcaacatttttgtgaacaatgtgggagtgcttcgcggaaagccaacaacagaatatggagcagacgatttcgctttccatatctcaacaaacttggaatctgcttaccatttttgccagctttcacatcctctcctaaaggcttcaggctatggaagcattgtcttcttgtcctctgttgcaggggttgtatccacgagcggcggatcaatttatagtctaaccaaaggagctttaaatcagctagctagaaatttggcatgtgaatgggcagaagacagcatacgagccaacgctgttgcacctaatatcatcaagactccgctggccctaccttatcttgaggacgtcgggttcagggaaggactgttcggtagaactccacttggtcgagctggagagccgcatgaagttgcatcagttgtggtcttcttgtgtcttcctgcagcttcttatattactggtcagaccatttgtgttgatggaggcctaacgattaacggtttctcataccaaccacacgcttga

SEQ ID NO: 350 - protein, 243 aa, Brassica napus
MFGYAIVEELASFGARIHVCDISKTLLNQSLSEWEKKGFQVSGSVCDVTSRPEGETLIQKVSSLFDGKLNIFVNNVGVLRGKPTTEYGADDFAFHISTNLESAYHFCQLSHPLLKASGYGSIVFLSSVAGVVSTSGGSIYSLTKGALNQLARNLACEWAEDSIRANAVAPNIIKTPLALPYLEDVGFREGLFGRTPLGRAGEPHEVASVVVFLCLPAASYITGQTICVDGGLTINGFSYQPHA

SEQ ID NO: 351 - DNA, 711 bp, Brassica napus
atggtcgacgtccaagacgatctcggagacaaagttctcaaaactctgttagccaactcggaggagtcagcttgtttcatccacggtgacgtcacacaagaagacgacatcagtaacgctgttgacttcgccgtcaagcgtttcgggacacttgacatactcatcaacaacgcaggagtaagcgaagcaccgtgtccggacatccgcaacaacagtttaaccgagttcgagatggtcttcaacgtcaacgtgaaaggagctttcctagggatgaaacatgcggcgcgtgtgatgatccccgccaagaaaggctcgatagtctctttatgcagcgttggcggcgttgtcggaggcgttggtccgcacgcttacgtcggctccaagcacgcggttctaggtttgactaggagcgttgcggcggagctaggacagcatgggatacgcgtgaactgcgtttctccttacgcggttttgactaacctcgcgttggctcatttgcctgaggatgagaggaaggaaggcgtggtcgctggtttcaggagtttcgccgctgcgaacgcgaatctgaaaggtgttgagttgacggttgatgacgtggcgaacgcggttttgtttctggcgagtgatgagtcgcggtatgtgagtggagataatctgatggttgatggtgggttcacttgcactaaccactcctttaaagtttttagatga

SEQ ID NO: 352 - protein, 236 aa, Brassica napus
MVDVQDDLGDKVLKTLLANSEESACFIHGDVTQEDDISNAVDFAVKRFGTLDILINNAGVSEAPCPDIRNNSLTEFEMVFNVNVKGAFLGMKHAARVMIPAKKGSIVSLCSVGGVVGGVGPHAYVGSKHAVLGLTRSVAAELGQHGIRVNCVSPYAVLTNLALAHLPEDERKEGVVAGFRSFAAANANLKGVELTVDDVANAVLFLASDESRYVSGDNLMVDGGFTCTNHSFKVFR

SEQ ID NO: 353 - DNA, 963 bp, Glycine max
atggcttccattgccggatccaactgcgtcgctctccgaaccgccaacttcggcgcctccggtaaccggaaaatcggccagatccgccaatggtctccgattctcacgaatctccgtcccgtttccggtcttcgtcaccgatcgaatactccgtttagctcctccggtgtgagagcacaggttgctactctggaggaagcaggaaccggagcaactcagaaagtggaagcgccggttgcagtggtgaccggagcttccagaggcattggcaaagcgattgcactgtcattaggtaaagcaggttgcaaggttctggtcaactatgcaaggtcatccaaggaagctgaggaggtttccaaggagattgaggagtttggtggtcaagctcttacatttggtggagatgtttctaacgaggctgatgtggagtctatgattaaaactgcagttgatgcttggggaacagttgatgtattaataaacaatgcaggaataacaagagatggtttattaatgagaatgaagaaatctcaatggcaggatgttattgatctaaatctcactggtgtttttctttgcacacaggctgctgctaagattatgatgaagaaaaagaagggaaggatcgtcaatattgcatcagttgttggtttggttggcaatgttggacaagccaattatagtgctgcaaaagcaggagtaattggcctgacaaaaactgttgcgaaggaatatgctagtagaaacatcactgttaatgcagttgctccagggtttattgcatctgacatgactgccaagctaggacaagacattgagaaaaagattttggagacaatcccattaggaagatatggccagccagaggaagttgctggactggttgaattcttggctcttaatcaagctgccagttacatcactgggcaggttttcaccattgatggaggtatggtgatgtaa

SEQ ID NO: 354 - protein, 320 aa, Glycine max
MASIAGSNCVALRTANFGASGNRKIGQIRQWSPILTNLRPVSGLRHRSNTPFSSSGVRAQVATLEEAGTGATQKVEAPVAVVTGASRGIGKAIALSLGKAGCKVLVNYARSSKEAEEVSKEIEEFGGQALTFGGDVSNEADVESMIKTAVDAWGTVDVLINNAGITRDGLLMRMKKSQWQDVIDLNLTGVFLCTQAAAKIMMKKKKGRIVNIASVVGLVGNVGQANYSAAKAGVIGLTKTVAKEYASRNITVNAVAPGFIASDMTAKLGQDIEKKILETIPLGRYGQPEEVAGLVEFLALNQAASYITGQVFTIDGGMVM

SEQ ID NO: 355 - DNA, 828 bp, Glycine max
atggcaacttcaacctctgcactcaataaaaggctggaaggaaaagttgcactgatcacaggaggagctagtggcatcggcaaacgcactgcagaagtgttcgctcagcaaggagccaaagtagtgatcgctgacatccaagacgaactgggacattccgttgctcagtccatagggccatcaacatgttgttatgtccattgcgatgtcaccgatgagaaccaaataaaaaatgccgtccaaaaagccgtagatgcttatgggaagctagacatcatgttcaacaacgccggcattgttgatcccaacaagaaccgaatcattgacaacgataaggcagatttcgaacgtgtcctaagcgtcaatgtcacgggtgttttccttgggatgaagcatgcggcgcaggcgatgatcccagcacgcagtggtagcatcatctctacggccagcataagctcctacgttggtggtgcagcctcgcatgcttactgttgtgctaagcatgctgtggttggtctaactaaaaatgcagcagttgagcttggacagttcggaataagggtgaattgtttgtcaccttacgctcttgctacacctttggccaccaagtttgttggagctaatgatgaggagcttgagactatcatgaactcactggctaatctcaagggtgtcactcttaaagctgaggatgtggctaatgccgcactttattttgctagtgatgattccaggtacgtcagtgggcaaaatttgctcatagatggaggcttcagcattgttaatccttcctttcacatgtttcagtacccggactcggagtcttga

SEQ ID NO: 356 - protein, 275 aa, Glycine max
MATSTSALNKRLEGKVALITGGASGIGKRTAEVFAQQGAKVVIADIQDELGHSVAQSIGPSTCCYVHCDVTDENQIKNAVQKAVDAYGKLDIMFNNAGIVDPNKNRIIDNDKADFERVLSVNVTGVFLGMKHAAQAMIPARSGSIISTASISSYVGGAASHAYCCAKHAVVGLTKNAAVELGQFGIRVNCLSPYALATPLATKFVGANDEELETIMNSLANLKGVTLKAEDVANAALYFASDDSRYVSGQNLLIDGGFSIVNPSFHMFQYPDSES

SEQ ID NO: 357 - DNA, 783 bp, Glycine max
atgccatgtaggcttgaggggaaagtggctattatcactggtggtgcaagcggcataggtgaggccactgcaagactcttctctaagcacggagcacacgttgtcatagctgatattcaagacgatttgggtctctctatttgcaaacacttggaatccgcttcctatgttcactgcgacgtgacaaacgaaaccgacgttgaaaactgcgtgaacaccaccgtttccaaacacggcaaactagatatcatgttcaacaacgctggcataaccggtgtgaacaaaaccagcatcctcgacaacacaaagtcagagtttgaggaagtgatcaacgttaacctagttggtgtctttctgggaacaaagcacgccgcaagggtaatgatccctgctagaagaggaagcatagttaacactgcaagtgtttgtggaagcataggtggtgtagcatcacatgcatacacaagttccaaacacgccgtggtggggctcacaaagaacactgcggtggagcttggagcatttggtgttagggttaactgcgtgtcaccctacgtggttgccacgcccttggctaagaatttttttaagcttgatgatgacggagttcaggggatttattcaaaccttaagggtactgatcttgtgcctaatgatgtagccgaagctgctttgtacctggcaagtgatgagtccaagtatgttagtgggcacaatcttgtggttgatggaggcttcactgtggtcaatagtgggttttgtgtccttgggcaatcttcgtga

SEQ ID NO: 358 - protein, 260 aa, Glycine max
MPCRLEGKVAIITGGASGIGEATARLFSKHGAHVVIADIQDDLGLSICKHLESASYVHCDVTNETDVENCVNTTVSKHGKLDIMFNNAGITGVNKTSILDNTKSEFEEVINVNLVGVFLGTKHAARVMIPARRGSIVNTASVCGSIGGVASHAYTSSKHAVVGLTKNTAVELGAFGVRVNCVSPYVVATPLAKNFFKLDDDGVQGIYSNLKGTDLVPNDVAEAALYLASDESKYVSGHNLVVDGGFTVVNSGFCVLGQSS

SEQ ID NO: 359 - DNA, 885 bp, Glycine max
atggcaagcaataaggagtctaagttcccagcacagagccagaaaactcagccaggaaaagaacatgtaatgaatccactcccacaagccacaaatcctgatcacaaggccgccaataaactccagggaaaggtggcgttggtgacaggaggtgactcaggaattggcagagcggtttgcctgtgtttcgcaaaagagggtgcaaccgtggcctttacatacgtaaagggccatgaggacagggataaagatgatactctgaagatgctgcttgaagctaagacaagtggtgcagacaatccattggcaatagcagcggatattggctttgatgagaactgcaaacaggtcattgaccttgttgtcaaagaatatggccgccttgatgttctggtcaacaatgcagctgagcagcatttgacaaactctgttgaggaaatcacacaacagcagcttgagagagtcttcggaaccaacatcttttctcagttctttttggtcaagcatgctctgaagcacatgaaagaagggagctgcatcataaactctacttcagttaatgcatacaatgggaatccagaagcgttggactacactgctaccaagggagcaattgtggccttcaccagaggtctttctcagcagctagcgagtaggggaattagggtgaatggtgtggcacctggcccagtttggacgccaatacaaccagcttcaaagcctgctgagatgattcagaacttggggtgtgaggtgccaatgaaccgcgtggctcagccttgtgagattgcaccatgttatttgttcttggcaacttgtcaggactcttcctactttactggccaagtcctccatccaaatggtgggatggtcgtcaacgcttga

SEQ ID NO: 360 - protein, 294 aa, Glycine max
MASNKESKFPAQSQKTQPGKEHVMNPLPQATNPDHKAANKLQGKVALVTGGDSGIGRAVCLCFAKEGATVAFTYVKGHEDRDKDDTLKMLLEAKTSGADNPLAIAADIGFDENCKQVIDLVVKEYGRLDVLVNNAAEQHLTNSVEEITQQQLERVFGTNIFSQFFLVKHALKHMKEGSCIINSTSVNAYNGNPEALDYTATKGAIVAFTRGLSQQLASRGIRVNGVAPGPVWTPIQPASKPAEMIQNLGCEVPMNRVAQPCEIAPCYLFLATCQDSSYFTGQVLHPNGGMVVNA

SEQ ID NO: 361 - DNA, 804 bp, Glycine max
atggctgaggcaagcattggcagcaaaagcagcagatggtctttacagggaatgacagctctcgtcaccggtggatccaaaggaatcggatatgctatcgtggaggagttggcacagcttggagccactgtgcacacttgcgctcggaacgaagctgaactcaatgaatccttaaatgaatggaacacaaaaggatacagagtaactggttccgtctgtgacgtggcgtctcgtgcagaaagacaagacctcatagctagagtctccaatgagtttaatggcaaactcaatatccttgtaaacaacgtgggaacaaacgtaccgaaacatacccttgatgttacggaggaagacttctcatttctgataaatacaaatcttgaatctgcttaccacctaagccagcttgcacatcctctcctgaaagcttcagaggctgcaaacatcatttttatatcctccattgctggtgtgctatcaataggtataggatccacttatggtgcaacaaaaggagcaatgaaccaactgactaaaaatttggcatgtgagtgggccaaagacaatataaggactaattgcgttgcaccagggccaatcaaaacccctctcggtgacaagcattttaaaaatgaaaaacttcttaatgctttcatttcgcaaaccccccttggacggattggagaagcagaggaagtgtcttcattggtggcattcctctgcttacctgcagcctcttacataacaggacagaccatttgtgttgatggtggattaacagtgaatggtctctatataaattga

SEQ ID NO: 362 - protein, 267 aa, Glycine max
MAEASIGSKSSRWSLQGMTALVTGGSKGIGYAIVEELAQLGATVHTCARNEAELNESLNEWNTKGYRVTGSVCDVASRAERQDLIARVSNEFNGKLNILVNNVGTNVPKHTLDVTEEDFSFLINTNLESAYHLSQLAHPLLKASEAANIIFISSIAGVLSIGIGSTYGATKGAMNQLTKNLACEWAKDNIRTNCVAPGPIKTPLGDKHFKNEKLLNAFISQTPLGRIGEAEEVSSLVAFLCLPAASYITGQTICVDGGLTVNGLYIN

SEQ ID NO: 363 - DNA, 819 bp, Glycine max
atggcagaagcaggaagcagcattaacagaggagcaagatggtctctcaatggaacgacggctctcgtcaccggcggcacccgtgggatcgggcacgccatagtgagtgacttggccgcgtttggcgctgctgtgcacacttgctccaggacccaaacagagctcaacaaatgcttacaagagtggcagagtctgggctttcaggtaactgggtcggtgtgtgacgtgtcctcaccatcccagagagagaagctcattgaggaagtcacttccatcttgaatggcaagcttaacatctatgtgaacaatgttggaacaaactttagaaagccaaccattgagtacactgctgaagaatattcacagcttatgacagttaatttagactcctcattccatctgtgccaacttgcatatcctcttctgaaagcatctgaaaatggaagcattgtgtttatttcatctgttgctggtgtggtgagcttgggtactggagctgtttatgcagcaagtaaagctgcaattaatcagcttacaaaaaacctggcttgtgaatgggccaaagacaacataaggagcaactgtgttgtaccatgggcaaccagaaccccacttgtagaacatttgttgagagaccaaaagtttgtggatgatattatgtctcgaactccgattaaacgtatagcagaacccgaagaagtgtcatcgttggtgactgtcctttgcttgcctgctgcttcttacatcactggacaggttatttgtgttgatggaggattaacggtgaatggatgtcaacccagcatgagaattacctga

SEQ ID NO: 364 - protein, 272 aa, Glycine max
MAEAGSSINRGARWSLNGTTALVTGGTRGIGHAIVSDLAAFGAAVHTCSRTQTELNKCLQEWQSLGFQVTGSVCDVSSPSQREKLIEEVTSILNGKLNIYVNNVGTNFRKPTIEYTAEEYSQLMTVNLDSSFHLCQLAYPLLKASENGSIVFISSVAGVVSLGTGAVYAASKAAINQLTKNLACEWAKDNIRSNCVVPWATRTPLVEHLLRDQKFVDDIMSRTPIKRIAEPEEVSSLVTVLCLPAASYITGQVICVDGGLTVNGCQPSMRIT

SEQ ID NO: 365 - DNA, 843 bp, Glycine max
atgtccactactggtactgttctggcttccactccaacacaaaggctattaggcaaagtggcattggttactggtggagcgtctggaattggagaaagcattgtgcgcctcttccatatccatggtgctaaaatatgtatagctgatgtgcaagacaaccttggaaagcaggtctgtcagtctcttggtgatgaagcaaatgttgtttttgtccattgtgatgttacagtagaggatgatgtttcccatgcagtggacttcactgtgggtaaatttggcacccttcacatcatagtcaacaatgccggaatttctggatcaccttgttccgatatccgcaatgcagacttatcagaattcgataaggtgtttagtgtaaatacgaagggagtgttccacgggatgaaacacgctgctcgaattatgatcccgaagaagaagggctcaatcatttctttatgcagtgtagcaagtgccataggtggcttaggaccgcatgcatacacagggtccaagtatgctgtattggggctcacaaagaatgttgcagctgaattggggaaacatgctataagagtgaactgtgtgtcaccttatggtgttgcaacaggtttggccttggctcatttgcctgaggatgagagaactgatgatgccttggtcagttttcgtgattttactgggagaatggccaacttgcagggggtagaattaactactcacgatgtggctaatgctgtgctcttccttgcaagtgatgatgctaaatatataagtggagagaatctcatggttgatggaggcttcacaagtgcaaatcactcactccaagtttttagatga

SEQ ID NO: 366 - protein, 280 aa, Glycine max
MSTTGTVLASTPTQRLLGKVALVTGGASGIGESIVRLFHIHGAKICIADVQDNLGKQVCQSLGDEANVVFVHCDVTVEDDVSHAVDFTVGKFGTLHIIVNNAGISGSPCSDIRNADLSEFDKVFSVNTKGVFHGMKHAARIMIPKKKGSIISLCSVASAIGGLGPHAYTGSKYAVLGLTKNVAAELGKHAIRVNCVSPYGVATGLALAHLPEDERTDDALVSFRDFTGRMANLQGVELTTHDVANAVLFLASDDAKYISGENLMVDGGFTSANHSLQVFR

SEQ ID NO: 367 - DNA, 849 bp, Glycine max
atggctacgcaactttccgaccgcctcgagccatggcacaccctcgccggaaaagtcgtaatggtcaccggcgcctcctccggcctcggccgcgacttctgcctcgacctcggtcgggctggctgtcgggtcgtcgtggcggcccgcagagtcgaccgcctcgagtccctgtgcgacgaaattaacagcatggccgccggagacggtggccgaagccgccgcgccgtcgccgttgaactcgatgtcgctgccgatgaccccgccgtcgacaaatacgtgcagaaggcgtgggaggcgtttggtcacattgatgctcttatcaacaacgctggtgtcagagggaatgtcaaatcacctttggaattgtctgaggaggaatggaaccatgcgttcagaacaaacttaactgggacatggttggtctcaaaatatgtatgcaaacgcatgcgtgatgcacaaagaaaaggatcaatcattaatattgcttcaattgctggtttgaaccgtggtcaattgcctggaggtgctgcatattcatcctcaaaagcaggcgtcaatatgctaacaagggtcatggcattagaattgggggcacacaaaatcagagtgaattccatatcacctggacttttcaaatctgaaatcactgaaaaactaatggagaaaaattggttgaataatgtggccatgaaaacagtacccttgagaaaatttggcacttctgatccagcattaacatcgctggctcgttatttaattcacgattcttctgagtatgtgtcaggcaacaattttgttgtggatgctggagccaccttaccaggtgtgcctatttattcctccctatga

SEQ ID NO: 368 - protein, 282 aa, Glycine max
MATQLSDRLEPWHTLAGKVVMVTGASSGLGRDFCLDLGRAGCRVVVAARRVDRLESLCDEINSMAAGDGGRSRRAVAVELDVAADDPAVDKYVQKAWEAFGHIDALINNAGVRGNVKSPLELSEEEWNHAFRTNLTGTWLVSKYVCKRMRDAQRKGSIINIASIAGLNRGQLPGGAAYSSSKAGVNMLTRVMALELGAHKIRVNSISPGLFKSEITEKLMEKNWLNNVAMKTVPLRKFGTSDPALTSLARYLIHDSSEYVSGNNFVVDAGATLPGVPIYSSL

SEQ ID NO: 369 - DNA, 849 bp, Glycine max
atgaatgccatagcagcagaacaagtgctggagccatggcacaagctagacgacaaagtcgttttggtgacgggtgcttcctcggggctcgggcgagatttctgcatcgacctcgccaaagctggctgctgtgtcgtcgcggcagctcgtcgcctcgatcgcctcacttccctctgccacgaaatcaaccaccgatggccctcgaacgtcggaatccaccgcgcggtggcggtggagcttgatgtcgccgccgatggccccgccatcgacagggctgtgcagaaggcctgggacgcctttggccgcgttgattccttgattaacaacgctggtgtcagaggaagtgttaaatcacccttgaaattgtctgaagaggaatgggatcatgtcttcaagactaacctaactggttgttggttggtgtcaaaatatgtatgcaaacgcatgtgtgatatccagcttaagggatcaattattaatatttcttcagtttctggtttaaatcgggggcaattgcctggagctgctgcatatgcatcttcgaaggcaggggtaaacatgctgactaaggtcatggctatggaattggggatgcacaaaattagagtaaattccatatcccctggaattttcaaatctgaaataactgaaaatttattacaaaaagattggctgaatgatgtggtcaggaaaataatgcctttgagaagattaggtacttcagatccagcattaacatctctagctcgttatcttattcatgattcttctgagtacgtcacgggcaacaattttattgtcgattatggaggcaccttaccaggtgtaccaatttattcttctctgtga

SEQ ID NO: 370 - protein, 282 aa, Glycine max
MNAIAAEQVLEPWHKLDDKVVLVTGASSGLGRDFCIDLAKAGCCVVAAARRLDRLTSLCHEINHRWPSNVGIHRAVAVELDVAADGPAIDRAVQKAWDAFGRVDSLINNAGVRGSVKSPLKLSEEEWDHVFKTNLTGCWLVSKYVCKRMCDIQLKGSIINISSVSGLNRGQLPGAAAYASSKAGVNMLTKVMAMELGMHKIRVNSISPGIFKSEITENLLQKDWLNDVVRKIMPLRRLGTSDPALTSLARYLIHDSSEYVTGNNFIVDYGGTLPGVPIYSSL

SEQ ID NO: 371 - DNA, 798 bp, Glycine max
atggcttctagttcagaatctcaatctcagtctaaaccgctccaagaccgagttgcaatcgtcaccggctcgtcccgcggaatcggccgagaaatcgcgcttcacctcgcctcactcggcgcgcgactcgtcgtcaactacacctccaactcggcccaagccgactcagtcgcggcgcagatcaacgccggttccgccaccacgacaccgcgcgccgtcgtggtccaagccgacgtgtccgatccggctcaggtgaagtcgctcttcgactcggccgagcgcgccttcgactcgccgatccacatccttgtcaactcggcgggcgtgatcgacggcacgtatccctccgtcgccgacaccaccgtggagtccttcgaccgcactttcgcggtgaacgcgcgtggcgccttcgcgtgcgccagggaggccgcgaaccgcctcaagcgcggcggcggagggcggatcattctactgacgacatcgcaggtggtggcgctgaggccggggtacggggcgtacgcggcgtcgaaggcggcggtggaggcaatggtgaagatcctggcgaaggaactgaaagggacgcagataacggcgaattgcgttgcgccgggaccgattgcgacggagatgttcttcgagggtaagacggaggaggtggtgaatcggatcgtgcaagagagtcccttggggaggctcggtgagaccaaagacgtggcacccgttgtgggattcttggccactgatgcttctgaatgggtcaacggtcaaattgttcgtgtcaacggtggctatatttga

SEQ ID NO: 372 - protein, 265 aa, Glycine max
MASSSESQSQSKPLQDRVAIVTGSSRGIGREIALHLASLGARLVVNYTSNSAQADSVAAQINAGSATTTPRAVVVQADVSDPAQVKSLFDSAERAFDSPIHILVNSAGVIDGTYPSVADTTVESFDRTFAVNARGAFACAREAANRLKRGGGGRIILLTTSQVVALRPGYGAYAASKAAVEAMVKILAKELKGTQITANCVAPGPIATEMFFEGKTEEVVNRIVQESPLGRLGETKDVAPVVGFLATDASEWVNGQIVRVNGGYI

SEQ ID NO: 373 - DNA, 795 bp, Glycine max
atggctgaaacaaagtgggtcatgaaggacaaaagatggtctctccatggaatgacagctctagtcacaggaggcacccgaggcatagggcatgccattgttgaagagttagctgagtttggagcaactgttcatatatgtgcacgtaatcaagatgatatagataaatgtttagaagagtggaaaagcaagggacttaatgtgactggttcagtatgtgatttactatgttctgaccaacgtaaaagattaatggaaattgttggctccatctttcatggaaagctcaatattctagtgaacaatgctgctacaaatataacaaagaagataacagattacacagcagaggatatatcagccataatgggcaccaattttgagtccgtttaccatttgtgtcaagttgcacacccacttctaaaagattctgggaatgggagcatagtatttatttcttccgtagcaggtttaaaagctcttcctgtgttctctgtttatgcagcctctaaaggagccatgaatcaattcaccaaaaacttggcattggaatgggcaaaggataatattcgtgcaaatgctgttgcccctggacctgttaagactaaacttttggagtgtatcgtgaattcttcggaagggaatgagtctataaatggagtagtgtctcaaacatttgttggtcgcatgggagaaactaaagagatatcagcattagttgcttttctttgccttccggctgcatcatacatcactggacaggttatatgtgtagatgggggtttcacaacttga

SEQ ID NO: 374 - protein, 264 aa, Glycine max
MAETKWVMKDKRWSLHGMTALVTGGTRGIGHAIVEELAEFGATVHICARNQDDIDKCLEEWKSKGLNVTGSVCDLLCSDQRKRLMEIVGSIFHGKLNILVNNAATNITKKITDYTAEDISAIMGTNFESVYHLCQVAHPLLKDSGNGSIVFISSVAGLKALPVFSVYAASKGAMNQFTKNLALEWAKDNIRANAVAPGPVKTKLLECIVNSSEGNESINGVVSQTFVGRMGETKEISALVAFLCLPAASYITGQVICVDGGFTT

SEQ ID NO: 375 - DNA, 816 bp, Glycine max
atggcgaaccctgaaggcagtagcagaggctctagatggtcccttaagggaaccactgctctcgttactggaggaacgcgtggaattgggcacgctgtggtggaggaactagcggagtttggtgccacagtgtacacttgttcgaggaatgaagaagagctgaatgcatgcttgaaggagtggaaagagaagggattttcggtttctgggttggtttgtgatgcgtcttctccaccccatagagagaacctcattcaacaagtggcctctgctttcaacggcaagctcaacatacttgtaaacaatgttggaacaaatgtgaggaagccgacaattgagtatacagccgaagaatattcaaaattgatggcaactaacttggactccacataccatttgtgccaacttgcatatcctcttcttaaagcatctggaaatggaagtattgtgtccatttcctctgttgcaagtcagacaagcgtaggttctggagccatttacgcagcaactaaagctgctattgatcagcttaccaaatattttgcttgtgaatgggcaaaagacaatataaggagcaacggtgttgcaccctggtataccataacttcacttgtggaacctttgcttgcgaacaaacagcttgttagtgagataatatctcgaacgccgataaagcggatggcagaaacacatgaagtttcatccttggtgactttcctttgcctgccagcagcatcctacatcactggacagattgtttcagttgatggaggattcactgctaatggatttcaacccagcatgagaatttcttga

SEQ ID NO: 376 - protein, 271 aa, Glycine max
MANPEGSSRGSRWSLKGTTALVTGGTRGIGHAVVEELAEFGATVYTCSRNEEELNACLKEWKEKGFSVSGLVCDASSPPHRENLIQQVASAFNGKLNILVNNVGTNVRKPTIEYTAEEYSKLMATNLDSTYHLCQLAYPLLKASGNGSIVSISSVASQTSVGSGAIYAATKAAIDQLTKYFACEWAKDNIRSNGVAPWYTITSLVEPLLANKQLVSEIISRTPIKRMAETHEVSSLVTFLCLPAASYITGQIVSVDGGFTANGFQPSMRIS

SEQ ID NO: 377 - DNA, 771 bp, Hordeum vulgare
atgagcagggaggagaggtggagcctggccggcgcgacgcgctcgtcaccggcggcagaaagggatcggccacgcgatcgtggaggagctggcggggcacggggcgcgggtgcacacgtgcgccaggagccggcggacgtggaggagtgccgccgccggtgggaggccaaggggcttccggtcaccgtctccgtctgcgacgtctccctgcgcgcccacagggagcagctcgtggagacggtcaagcaagtcttcggcggcaagctcgacatactggtgaacaacgcggcacagattcttgccaaggcggccgtggagtggacatcggaggagtactcgcacctcatggcgaccaatctagagtcgtgcttccacctcagccagctcgcgcaccccttgctcctcaacgcctccatcgctggaggtagcatcgtcaacatatcctcccttgggggcacacttggtttcacgggccttgcgctttacagtatgacaaaaggaggaataaaccagcttacaaggagccttgctactgaatgggcccagaacaagatccgggtgaattgcgtcgccccgggcgcgaccaagagtgacatgttaagcagtctcccactggagattagagagaacgagttggcgaggactccaatgcggcgggcaggcgagccagcggaggtggctgcaatggtgtcgttcctctgcatgccggcggcatccttcgtcaccggccaggtcatcgccgtcgacggtggtcggacaattagtgcttga

SEQ ID NO: 378 - protein, 256 aa, Hordeum vulgare
MSREERWSLAGATRSSPAAERDRPRDRGGAGGARGAGAHVRQEPADVEECRRRWEAKGLPVTVSVCDVSLRAHREQLVETVKQVFGGKLDILVNNAAQILAKAAVEWTSEEYSHLMATNLESCFHLSQLAHPLLLNASIAGGSIVNISSLGGTLGFTGLALYSMTKGGINQLTRSLATEWAQNKIRVNCVAPGATKSDMLSSLPLEIRENELARTPMRRAGEPAEVAAMVSFLCMPAASFVTGQVIAVDGGRTISA

SEQ ID NO: 379 - DNA, 972 bp, Linum usitatissimum
atggctgctagtaccggatccaccgccgtcgcattcaaatccgccgggttcgtcgctgcctcctccggcgaaaggggcattaaccagttccgccactggtctcctgttcccgccagcctccacttctcccgcgctggcctccgctgcagatcgagaagctcggtatcctcttccggtgtgagagctcaggttgctgcagttgaaccagtaagcagtgagtcagttaagaaggtggaatctccagtcgttattgtaactggagcttccagaggaatcgggaaagcgattgcattgtcgttggggaaagcaggttgcaaggttctggttaactatgcaaggtcatccaaggaggctgaggaagtctccaaagagattgaagcttccggtggtcaagctgtaacctttggtggtgatgtctctaaagaagaggatgtggaggccatgatgaaaactgctattgatgcttttggaacagttgacatactgataaacaatgcagggatcacaagggacactttgttgatgcggatgaagaaacagcagtggcaggatgttattgacctcaatcttactggtgtcttcctttgtacacaggctgcagccaagatcatgatgaagaaaagaaagggaaggattatcaatatcgcttcagttgttggtttggttggtaacattgggcaagctaactacagtgctgcaaaggctggagtcattggcttcacaaagagtgttgcgaaggaatattcaagcagaaatatcaacgtcaatgctgtcgctcctggattcattgcatctgacatgactgccaagcttggggatgacattgaaaagaaaatattggagacaattcctttagggcggtacggtcagccggaagaggtggccggattggtggaattcctcgctctgaacccagctgctggctacatgaccgggcaggtgcttaccatcgacggaggaatggtgatgtga

SEQ ID NO: 380 - protein, 323 aa, Linum usitatissimum
MAASTGSTAVAFKSAGFVAASSGERGINQFRHWSPVPASLHFSRAGLRCRSRSSVSSSGVRAQVAAVEPVSSESVKKVESPVVIVTGASRGIGKAIALSLGKAGCKVLVNYARSSKEAEEVSKEIEASGGQAVTFGGDVSKEEDVEAMMKTAIDAFGTVDILINNAGITRDTLLMRMKKQQWQDVIDLNLTGVFLCTQAAAKIMMKKRKGRIINIASVVGLVGNIGQANYSAAKAGVIGFTKSVAKEYSSRNINVNAVAPGFIASDMTAKLGDDIEKKILETIPLGRYGQPEEVAGLVEFLALNPAAGYMTGQVLTIDGGMVM

SEQ ID NO: 381 - DNA, 762 bp, Oryza sativa
atggaggtgaagtgccgtcggctggaggggaaggtagccgtcgtgacggcctccacgcagggcatcggtctcgccatcgccgagcgcctcggcctcgagggcgccgccgtcgtcatctcctcccgcaagaagaagaacgtcgacgaggcggtcgtgggcctcagggcgaaggggatcaccgtcgtcggggtggtctgccatgtctccatcccggagcagcgcaagaacctcatcgacacggcggtcaagaattttgggcatatcgacatagttgtctccaatgctgctgccaatccttccgtagataacatattagaaatgaaagagcctatccttgacaaactatgggatattaatgttaaggcatctattcttcttcttcaggatgctgctgcatatttgcggaagggatcatccgtgatattgatttcttcaattactggctataatccagaaccagcattgtcgatgtatgctgttacaaaaactgccctgcttggtctcacaaaggctcttgctgctgagatggggccaaatactcgtgttaactgtatagcccctggttttgttcctacaaattttgctcgtttcctcacaactaatgacaccattaaaaatgagcttattgacaggagcacacttaagagattgggtactgtggaagacatggctgcagccgcagctttcttggcatcagacgatgcatcattcattacagctgaaactattgctgttgctgcaggaactcgatctaggctgtag

SEQ ID NO: 382 - protein, 253 aa, Oryza sativa
MEVKCRRLEGKVAVVTASTQGIGLAIAERLGLEGAAVVISSRKKKNVDEAVVGLRAKGITVVGVVCHVSIPEQRKNLIDTAVKNFGHIDIVVSNAAANPSVDNILEMKEPILDKLWDINVKASILLLQDAAAYLRKGSSVILISSITGYNPEPALSMYAVTKTALLGLTKALAAEMGPNTRVNCIAPGFVPTNFARFLTTNDTIKNELIDRSTLKRLGTVEDMAAAAAFLASDDASFITAETIAVAAGTRSRL

SEQ ID NO: 383 - DNA, 963 bp, Zea mays
atggccaccgccgccgccaccgcagcagcagcagcagtctcctccccggctgcgcgtggagcagccggggccgccgccgcctcccgccgggggttcgtcacgtttggtggaggcgccgcccgcttctctcccacgctgcggtccggccgtgggttctctggtgtgcaaacccatgttgctgctgttgaacaagcagttgtaaaagatgctaccaagctggaagctccagttgttgttgttacaggtgcatctagagggattggtaaggcaactgctctagcccttggaaaagcaggatgcaaggttctggtaaactatgcccggtcctcgaaagaggctgaagaggtctccaaagagattgaagcatctggtggtgaggctatcaccttcggaggagatgtttcaaaagaagctgatgtagagtctatgatgaaagcagctctagataaatggggaacaatagatgtgctggtaaataatgcaggtttagggattacacgagacacattgttgatgaggatgaagaaatctcagtggcaagacgtaattgatctgaatcttactggcgtcttcctttgtacacaggctgcaacaaaagtaatgatgaaaaagagaaagggaaaaattatcaacattgcatctgtagttggtcttactggcaatgttggccaagctaattatagcgcagccaaggctggagtgattggtttcacaaaaacagttgccagggagtatgcaagcagaaatatcaatgtcaatgctattgcaccagggttcattgcatctgatatgactgccgaacttggagaagagcttgagaagaaaatcttgtcaaccattccgttaggtagatatggccaaccagaggaagttgcagggttggtcgagttcctggcccttaaccccgcagctagctatatgactggacaggtgcttacaattgacggagggatggtaatgtaa

SEQ ID NO: 384 - protein, 320 aa, Zea mays
MATAAATAAAAAVSSPAARGAAGAAAASRRGFVTFGGGAARFSPTLRSGRGFSGVQTHVAAVEQAVVKDATKLEAPVVVVTGASRGIGKATALALGKAGCKVLVNYARSSKEAEEVSKEIEASGGEAITFGGDVSKEADVESMMKAALDKWGTIDVLVNNAGLGITRDTLLMRMKKSQWQDVIDLNLTGVFLCTQAATKVMMKKRKGKIINIASVVGLTGNVGQANYSAAKAGVIGFTKTVAREYASRNINVNAIAPGFIASDMTAELGEELEKKILSTIPLGRYGQPEEVAGLVEFLALNPAASYMTGQVLTIDGGMVM

SEQ ID NO: 385 - DNA, 738 bp, Zea mays
atggcagcagcagagcgcgaccgcgagcgatggatcctgcccggcgcgacggcgctggtcaccggcgggagcaaggggatcgggcacgcgatcgtggaggagctggcggcgctgggcgcgcgcgtgcacacgtgctcccgcaacgccgcggagctggaggagtgccgccggaggtgggcagagaagggcggcggcctgctgcagcaggtgaccgtctccgtctgcgacgtcgccgtgcgcgccgacagggaggcgctcatggccaccgtcagggatgtcttcggcggcaagctggacatcctcgtgaataacgcggcgcaggtggtcttcaagccggcggtggagtgcaccggggaggagtacacgcggatcatggcgaccaacctggagtcctgcttccacctcagccagctcgcgcacccgctgctccgcgacgcctccctcgccggcggcgggagcgtcgtgcacatctcctccaccgcgggcctcctcggctttcgaggggcggtgctttacagcactgcgaaaggaggagtgaaccagctcacgaggagcctggctgctgagtgggcctgtgacaagattcgtgtcaactcggtcgcgccaggaatcgtcatgactgacatggttaagaacgcagcaagctcggaggccgtcgagcaagaaacttcacggattccgctgcggcgggccggcgagccggcagaggtggcgtccgtggtgtcgtttctgtgcatg

SEQ ID NO: 386 - protein, 246 aa, Zea mays
MAAAERDRERWILPGATALVTGGSKGIGHAIVEELAALGARVHTCSRNAAELEECRRRWAEKGGGLLQQVTVSVCDVAVRADREALMATVRDVFGGKLDILVNNAAQVVFKPAVECTGEEYTRIMATNLESCFHLSQLAHPLLRDASLAGGGSVVHISSTAGLLGFRGAVLYSTAKGGVNQLTRSLAAEWACDKIRVNSVAPGIVMTDMVKNAASSEAVEQETSRIPLRRAGEPAEVASVVSFLCM

SEQ ID NO: 387 - DNA, 774 bp, Zea mays
atggtggctgccggcaggaacagggcggagcggtggaacctcgccggcgcgacggcgctcgtcaccggcggcagcaagggcattgggcacgcgatcgtcgaggagctcgccgggttcggcgcccgggtgcacacgtgctcgcgcaacgcggcggagctggaggagtgccggcggagatgggacgagaaggggctgcaggtgaccgtgtccgcctgcgacgtgtcggcgcgcgccgaccgcgagcgcctcgtggccaccgtgggggccaccttcggcggcaggctcgatatcctcgtgaacaacgcggggcagtccctgttcaagcggacggccgagtgcaccggcgaggactactcccggatcatggcgaccaacctggagtcgtgcttccacctcagccagctcgcgcacccgctcctccgcctcgccagcggcggcgggggcggcagcgtcgtgcacgtctcctccgtcgctggcttcgtcgggctcccggcgctcgccgtctactccatgtccaagggcgccctgaaccagctcacgcgcagcctcgccgccgagtgggccggcgacggcatccgcgtcaactgcgtcgcgccggggggcatcagaaccgacatcagcagcgataagacgatagacccagagctggcgaagagggagatggcgcgggtgcccatggggaggatcggcgagccggaggaggtggcgtccatggtggccttcctctgcatgccggcggcgtcctacatgaccggccaagtcatctgcatcgat

SEQ ID NO: 388 - protein, 258 aa, Zea mays
MVAAGRNRAERWNLAGATALVTGGSKGIGHAIVEELAGFGARVHTCSRNAAELEECRRRWDEKGLQVTVSACDVSARADRERLVATVGATFGGRLDILVNNAGQSLFKRTAECTGEDYSRIMATNLESCFHLSQLAHPLLRLASGGGGGSVVHVSSVAGFVGLPALAVYSMSKGALNQLTRSLAAEWAGDGIRVNCVAPGGIRTDISSDKTIDPELAKREMARVPMGRIGEPEEVASMVAFLCMPAASYMTGQVICID

SEQ ID NO: 389 - DNA, 963 bp, Zea mays; identical to SEQ ID NO: 383

SEQ ID NO: 390 - protein, 318 aa, Zea mays
MATAAATAAAAAVSSPAARGAAGAAAASRRGFVTFGGGAARFSPTLRSGRGFSGVQTHVAAVEQAVVKDATKLEAPVVVVTGASRGIGKATALALGKAGCKVLVNYARSSKEAEEVSKEIEASGGEAITFGGDVSKEADVESMMKAALDKWGTIDVLVNNAGITRDTLLMRMKKSQWQDVIDLNLTGVFLCTQAATKVMMKKRKGKIINIASVVGLTGNVGQANYSAAKAGVIGFTKTVAREYASRNINVNAIAPGFIASDMTAELGEELEKKILSTIPLGRYGQPEEVAGLVEFLALNPAASYMTGQVLTIDGGMVM

SEQ ID NO: 391 - DNA, 762 bp, Zea mays
atggatgtcaagtgccggcgtctggaggggaaggtggccatcgtgacggcgtccacgatggggatcggcctcgccatcgccgagcgcctcggtctggagggcgccgccgtggtcatctcctcccgcaagcagaagaacgttaacgaggcggtggaggggctcagggccaagggtatcaccgcggttggtgccgtctgccacgtctccgacgcacagcagcgcaagagcctcatcgagacggccgtcaagagctttgggcacatagatatccttgtctccaatgctgccgcaaatccttctgtagatagcatacttgaaatgaaagagtctgttctcgataagctgtgggatattaacgtcaaggcttctatccttcttattcaggatgctgctcctcacctacggaaggggtcatctgtgattattatttcttcaattgctggttacaatccagaacaaggattgacaatgtatggtgtcacaaagactgctctctttggtctcacgaaggctcttgctggtgagatgggacccgatactcgtgttaactgtgtagcccctggttttgttcctacacggtttgctagtttcctcacagaaaatgagaccattaggaaagagcttaacgagaggaccaagcttaagagattgggtactgtggaagacatggctgcggctgcggcttttctggcgtctgacgacgcatcatacattacggctgaaaccattgttgttgctggaggggtgcagtctaggctgtga

SEQ ID NO: 392 - protein, 253 aa, Zea mays
MDVKCRRLEGKVAIVTASTMGIGLAIAERLGLEGAAVVISSRKQKNVNEAVEGLRAKGITAVGAVCHVSDAQQRKSLIETAVKSFGHIDILVSNAAANPSVDSILEMKESVLDKLWDINVKASILLIQDAAPHLRKGSSVIIISSIAGYNPEQGLTMYGVTKTALFGLTKALAGEMGPDTRVNCVAPGFVPTRFASFLTENETIRKELNERTKLKRLGTVEDMAAAAAFLASDDASYITAETIVVAGGVQSRL

SEQ ID NO: 393 - DNA, 822 bp, Zea mays
atggccacggtggagacatcgggcacggcgatagggtcctccgggagatgggcactacacggcaagacagccctcgtcaccggcggcacccgcggcatcgggcgtgcggtagtggaggagctggcggcgctgggggcggccgtgcacacatgctcccggaaggcggaggagctcggcgagcgcatcaaggagtgggaggccaggggattcagcgttaccgggtccgtctgcgacctctccgagagggaccagcgggagcggttgctccgcgaggttgccgaccgcttcggcggcaagctcaacatcctcgtaaacaatgtaggaacaaacataaggaaaccaactactgagtttactgcagaggaatactcgtttctgatggctactaatcttgaatctgcatatcacttgtgccaaattgcacatcctcttttgaaattatctgggtcaggcagcattatattcatatcatctgttgctggagcgataggaatctttagtggaactatatatgctatgactaaaggtgccattaaccagctaaccaagaatttagcttgtgaatgggctaaggacaacataagagccaactctgtcgctccgtggtacatcaccacttcacttacggaaggaattttggcaaataagaactttgaggaacaagttgtgagtcgaactccgcttggacgtgtcggagaacctggagaagtatcggcacttgttgcttttctttgcatgccgggttccacttatattagcggccagacgattgcggtcgacggaggtatgactgtgaacgggttttaccctcccaagccctag

SEQ ID NO: 394 - protein, 273 aa, Zea mays
MATVETSGTAIGSSGRWALHGKTALVTGGTRGIGRAVVEELAALGAAVHTCSRKAEELGERIKEWEARGFSVTGSVCDLSERDQRERLLREVADRFGGKLNILVNNVGTNIRKPTTEFTAEEYSFLMATNLESAYHLCQIAHPLLKLSGSGSIIFISSVAGAIGIFSGTIYAMTKGAINQLTKNLACEWAKDNIRANSVAPWYITTSLTEGILANKNFEEQVVSRTPLGRVGEPGEVSALVAFLCMPGSTYISGQTIAVDGGMTVNGFYPPKP

SEQ ID NO: 395 - DNA, 762 bp, Zea mays
atggatgtcaaatgccggcgtctggaggggaaggtggccgtcgtgacggcgtccacgcaggggatcggcctcgccatcgccgagcgcctcggcctggagggcgccgccgtcgtcgtctcctcccgcaagcagaagaacgtggacgaggccgtggaggggctcaaggccaaggggatcaccgtggtgggcgccgtctgccacgtatccgacgcacagcaacgcaagaacctcgtcgagacggccgtcaagaactttgggcacattgatattcttgtctccaacgctgctgcaaatcctactgtgaatgtcatacttgaaatgaaagaggttgttctcgataagttgtgggatattaacgtcaaggcttctattcttcttattcaggatgctgctccccacctacgagcaaggtcatctgtgatccttatttcttcaattgctggttacaatcctgagcacggattgacaatgtatggtgttacaaagaccgctctctttggtctcacaaaggctcttgctggtgagatgggacccgatattcgtgttaactgtatagcccctggttttgttccgacacggtttgctagtttcttcgtagacaacgagaccattaggaaaaagcttaacgagaggactatgcttaagagattgggttccgtggaagatatggcggcagctgccgcattcctggcatctgacgatgcatcattcatcacagctgaaaccattgttgttgctggaggggtgccgtcgagattgtag

SEQ ID NO: 396 - protein, 253 aa, Zea mays
MDVKCRRLEGKVAVVTASTQGIGLAIAERLGLEGAAVVVSSRKQKNVDEAVEGLKAKGITVVGAVCHVSDAQQRKNLVETAVKNFGHIDILVSNAAANPTVNVILEMKEVVLDKLWDINVKASILLIQDAAPHLRARSSVILISSIAGYNPEHGLTMYGVTKTALFGLTKALAGEMGPDIRVNCIAPGFVPTRFASFFVDNETIRKKLNERTMLKRLGSVEDMAAAAAFLASDDASFITAETIVVAGGVPSRL

SEQ ID NO: 397 - DNA, 1089 bp, Synechocystis PCC6803
atggttctagcatcttcccgtcccccttcccccaccaattccccggccgatcgccaggggactttgcaagcctggttaacaggtctcagtcagcgcattattgacggcgatcgcctaacccgggaagaagcattacagttggcggcgatcgagggggaagagaatattcttttgctctgtgaagcagccaatcgcattcgggaagcctgctgtggcaatgtggtggatctgtgtagcatcatcaatgttaaatccggtaactgctcggaaaactgcggcttttgctcccagtctagtcaccatcccgaccccaattcccccatttacggtctgaaaacggaagcagaaattttagaacaggccagggcggcagcggcggcgggagctaaacgcttttgcttagttagtcagggtcggggccccaaataccatagccccaaggatcgagaatttgagcagatcctggccacagtgcggcaaattatccaggaaaccaacatcaagccctgttgcgcgttgggggaagtgaccccggaacaggcccagcaattgaaggaagctggggtgactcgttataaccataacttggaagcatccgctacctattacgacaaaattgtcagcacccacacctggcaagaccgggtagatacggtgaaaaaccttaaggcagcgggcattcaagcttgcactggcggcattttaggcatgggagaaacctgggaagaccgcattgatctagctttggctctgcgggaactggaagtggaatccgtgcccctgaatctactcaatccccgccccggtactcctttgggggaacaacaaaagttaaatccctacgatgccctcaaggcgatcgccattttccggtttattttgccccaacaaattattcgctatgctgggggccgggaagcggtgatgggagaattacaggatttagggctaaaagcgggcattaacgctatgctagtgggccattatttaactaccctgggccagcctcccgaacgggatcaaaaattattggcatcccttggcctcgaagggggagaggcccctatccccggtgaataccaatcctga

SEQ ID NO: 398 - protein, 362 aa, Synechocystis PCC6803
MVLASSRPPSPTNSPADRQGTLQAWLTGLSQRIIDGDRLTREEALQLAAIEGEENILLLCEAANRIREACCGNVVDLCSIINVKSGNCSENCGFCSQSSHHPDPNSPIYGLKTEAEILEQARAAAAAGAKRFCLVSQGRGPKYHSPKDREFEQILATVRQIIQETNIKPCCALGEVTPEQAQQLKEAGVTRYNHNLEASATYYDKIVSTHTWQDRVDTVKNLKAAGIQACTGGILGMGETWEDRIDLALALRELEVESVPLNLLNPRPGTPLGEQQKLNPYDALKAIAIFRFILPQQIIRYAGGREAVMGELQDLGLKAGINAMLVGHYLTTLGQPPERDQKLLASLGLEGGEAPIPGEYQS

SEQ ID NO: 399 - DNA, 915 bp, Brassica napus
atgatgcttgctcgattcgtatttcgatctcagctcagaccttctctctccgcccgacaatctgcttcttactcctctgcttccgcagcctcagctgaagccgaaagaacgatccgtgaaggtccgagaaatgactggagcaaagatgaaatcaaagccgtctatgactctcccgttcttgacctcctcttccatggagcacaggttcataggcatgttcataacttcagggaagtgcagcaatgtactctcctctccataaagactggagggtgcagtgaggactgttcttattgtcctcagtcctccagatatgacactggagtcaaggcccaaagactcatgtccaaggacgctgtcattgttgctgctaagaaggcaaaagaagctggaagcacacggttttgcatgggtgctgcgtggagagatacaataggacggaaaacaaatttcaaccagatacttgactacatcaaagaaataagaggcatggggatggaggtttgctgcacattgggcatgattgagaagcagcaagcgttagagctaaagaaggccggactcactgcttataaccacaatcttgatacatcaagagagtactacccaaacgtcatcactacgagaagttatgacgatcgacttgaaactcttgagcatgttcgtgaagctggaatcaatgtctgttcaggaggaatcatagggcttggagaggcagaggaggacagagtaggtttattacacacattggcaacacttccttctcaccctgagagtgttcccatcaacgctctgctagcagtgaaaggcactcctcttgaagaccagaagccggttgagatatgggagatgatcaggatgattgcaacagcaaggatcgtgatgccaaaagcaatggtgaggctatctgcttag

SEQ ID NO: 400 - protein, 304 aa, Brassica napus
MMLARFVFRSQLRPSLSARQSASYSSASAASAEAERTIREGPRNDWSKDEIKAVYDSPVLDLLFHGAQVHRHVHNFREVQQCTLLSIKTGGCSEDCSYCPQSSRYDTGVKAQRLMSKDAVIVAAKKAKEAGSTRFCMGAAWRDTIGRKTNFNQILDYIKEIRGMGMEVCCTLGMIEKQQALELKKAGLTAYNHNLDTSREYYPNVITTRSYDDRLETLEHVREAGINVCSGGIIGLGEAEEDRVGLLHTLATLPSHPESVPINALLAVKGTPLEDQKPVEIWEMIRMIATARIVMPKAMVRLSA

SEQ ID NO: 401 - DNA, 1119 bp, Zea mays
atggccttgatgctgctagcgcgcaacctgcgctcccgcctccgcccaccgctcgccgccgccgcggcgttctcgtcggccgcggcggaggcggagagggcgatacgggacgggccgcggaacgactggagccggcccgagatccaggccgtctacgactcaccgctcctcgacctcctctttcacggggctcaggtccacagaaatgtccataaattcagagaagtgcagcaatgcacacttctttcaatcaagactggtggatgcagtgaagattgttcttactgtcctcagtcatcaagatacaacactggattgaaggcccaaaaattgatgaacaaatatgctgtcttggaagcagcaaaaaaggcaaaagagtctgggagcacccgtttttgcatgggagctgcatggagagaaaccattggcaggaaatcaaacttcaaccagattcttgaatatgtcaaggaaataaggggtatgggcatggaggtctgttgcacactaggcatgatagagaaacaacaagctgaagaactcaagaaggctggacttacagcatataatcataacctagatacatcaagagagtattatcccaacattattaccacaagatcatatgatgatagactgcagactcttgagcatgtccgtgaagctggaataagcatctgctcaggtggaatcattggtcttggtgaagcagaggaggaccgggtagggttgttgcataccctagctaccttgcctacacacccagagagcgttcctattaatgcattggttgctgtaaaaggcacacctcttgaggaccagaagcctgtagagatctgggaaatgatccgcatgatcgccactgctcggatcacgatgccaaaggcaatggtgaggctttcagcaggccgagtacggttctcgatgccagaacaagcgctgtgcttcctcgctggggccaactccatctttgccggcgagaaacttctcacaaccgcaaacaacgactttgatgcggaccaggcgatgttcaagatccttggcctgatccccaaggctccaagctttggcgaggaagaggcgtctgcggcggctcccacagaatccgagaggtctgagtag

SEQ ID NO: 402 - protein, 372 aa, Zea mays
MALMLLARNLRSRLRPPLAAAAAFSSAAAEAERAIRDGPRNDWSRPEIQAVYDSPLLDLLFHGAQVHRNVHKFREVQQCTLLSIKTGGCSEDCSYCPQSSRYNTGLKAQKLMNKYAVLEAAKKAKESGSTRFCMGAAWRETIGRKSNFNQILEYVKEIRGMGMEVCCTLGMIEKQQAEELKKAGLTAYNHNLDTSREYYPNIITTRSYDDRLQTLEHVREAGISICSGGIIGLGEAEEDRVGLLHTLATLPTHPESVPINALVAVKGTPLEDQKPVEIWEMIRMIATARITMPKAMVRLSAGRVRFSMPEQALCFLAGANSIFAGEKLLTTANNDFDADQAMFKILGLIPKAPSFGEEEASAAAPTESERSE

SEQ ID NO: 403 - DNA, 674 bp, Artificial sequence
  Promoter
caaatttacacattgccactaaacgtctaaacccttgtaatttgtttttgttttactatgtgtgttatgtatttgatttgcgataaatttttatatttggtactaaatttataacaccttttatgctaacgtttgccaacacttagcaatttgcaagttgattaattgattctaaattatttttgtcttctaaatacatatactaatcaactggaaatgtaaatatttgctaatatttctactataggagaattaaagtgagtgaatatggtaccacaaggtttggagatttaattgttgcaatgctgcatggatggcatatacaccaaacattcaataattcttgaggataataatggtaccacacaagatttgaggtgcatgaacgtcacgtggacaaaaggtttagtaatttttcaagacaacaatgttaccacacacaagttttgaggtgcatgcatggatgccctgtggaaagtttaaaaatattttggaaatgatttgcatggaagccatgtgtaaaaccatgacatccacttggaggatgcaataatgaagaaaactacaaatttacatgcaactagttatgcatgtagtctatataatgaggattttgcaatactttcattcatacacactcactaagttttacacgattataatttcttcatagc

SEQ ID NO: 404 - DNA, 695 bp, Artificial sequence
  Promoter
ctagactgcagcaaatttacacattgccactaaacgtctaaacccttgtaatttgtttttgttttactatgtgtgttatgtatttgatttgcgataaatttttatatttggtactaaatttataacaccttttatgctaacgtttgccaacacttagcaatttgcaagttgattaattgattctaaattatttttgtcttctaaatacatatactaatcaactggaaatgtaaatatttgctaatatttctactataggagaattaaagtgagtgaatatggtaccacaaggtttggagatttaattgttgcaatgctgcatggatggcatatacaccaaacattcaataattcttgaggataataatggtaccacacaagatttgaggtgcatgaacgtcacgtggacaaaaggtttagtaatttttcaagacaacaatgttaccacacacaagttttgaggtgcatgcatggatgccctgtggaaagtttaaaaatattttggaaatgatttgcatggaagccatgtgtaaaaccatgacatccacttggaggatgcaataatgaagaaaactacaaatttacatgcaactagttatgcatgtagtctatataatgaggattttgcaatactttcattcatacacactcactaagttttacacgattataatttcttcataccattaattaag

SEQ ID NO: 405 - DNA, 1112 bp, Artificial sequence
  Promoter
ggatccctgaaagcgacgttggatgttaacatctacaaattgccttttcttatcgaccatgtacgtaagcgcttacgtttttggtggacccttgaggaaactggtagctgttgtgggcctgtggtctcaagatggatcattaatttccaccttcacctacgatggggggcatcgcaccggtgagtaatattgtacggctaagagcgaatttggcctgtaggatccctgaaagcgacgttggatgttaacatctacaaattgccttttcttatcgaccatgtacgtaagcgcttacgtttttggtggacccttgaggaaactggtagctgttgtgggcctgtggtctcaagatggatcattaatttccaccttcacctacgatggggggcatcgcaccggtgagtaatattgtacggctaagagcgaatttggcctgtaggatccctgaaagcgacgttggatgttaacatctacaaattgccttttcttatcgaccatgtacgtaagcgcttacgtttttggtggacccttgaggaaactggtagctgttgtgggcctgtggtctcaagatggatcattaatttccaccttcacctacgatggggggcatcgcaccggtgagtaatattgtacggctaagagcgaatttggcctgtaggatccgcgagctggtcaatcccattgcttttgaagcagctcaacattgatctctttctcgatcgagggagatttttcaaatcagtgcgcaagacgtgacgtaagtatccgagtcagtttttatttttctactaatttggtcgtttatttcggcgtgtaggacatggcaaccgggcctgaatttcgcgggtattctgtttctattccaactttttcttgatccgcagccattaacgacttttgaatagatacgctgacacgccaagcctcgctagtcaaaagtgtaccaaacaacgctttacagcaagaacggaatgcgcgtgacgctcgcggtgacgccatttcgccttttcagaaatggataaatagccttgcttcctattatatcttcccaaattaccaatacattacactagcatctgaatttcataaccaatctcgatacaccaaatcga

SEQ ID NO: 406 - DNA, 986 bp, Artificial sequence
  Promoter
ctagaattcgaatccaaaaattacggatatgaatataggcatatccgtatccgaattatccgtttgacagctagcaacgattgtacaattgcttctttaaaaaaggaagaaagaaagaaagaaaagaatcaacatcagcgttaacaaacggccccgttacggcccaaacggtcatatagagtaacggcgttaagcgttgaaagactcctatcgaaatacgtaaccgcaaacgtgtcatagtcagatcccctcttccttcaccgcctcaaacacaaaaataatcttctacagcctatatatacaacccccccttctatctctcctttctcacaattcatcatctttctttctctacccccaattttaagaaatcctctcttctcctcttcattttcaaggtaaatctctctctctctctctctctctgttattccttgttttaattaggtatgtattattgctagtttgttaatctgcttatcttatgtatgccttatgtgaatatctttatcttgttcatctcatccgtttagaagctataaatttgttgatttgactgtgtatctacacgtggttatgtttatatctaatcagatatgaatttcttcatattgttgcgtttgtgtgtaccaatccgaaatcgttgatttttttcatttaatcgtgtagctaattgtacgtatacatatggatctacgtatcaattgttcatctgtttgtgtttgtatgtatacagatctgaaaacatcacttctctcatctgattgtgttgttacatacatagatatagatctgttatatcattttttttattaattgtgtatatatatatgtgcatagatctggattacatgattgtgattatttacatgattttgttatttacgtatgtatatatgtagatctggactttttggagttgttgacttgattgtatttgtgtgtgtatatgtgtgttctgatcttgatatgttatgtatgtgcag

SEQ ID NO: 407 - DNA, 102 bp, Arabidopsis thaliana
atgcagaggtttttctccgccagatcgattctcggttacgccgtcaagacgcggaggaggtctttctcttctcgttcttcgtctctcctttgctcttccatg

SEQ ID NO: 408 - protein, 34 aa, Arabidopsis thaliana
MQRFFSARSILGYAVKTRRRSFSSRSSSLLCSSM

SEQ ID NO: 409 - DNA, 102 bp, Arabidopsis thaliana
atgcagaggtttttctccgccagatcgattctcggttacgccgtcaagacgcggaggaggtctttctcttctcgttcttcggaattccagctgaccaccatg

SEQ ID NO: 410 - protein, 34 aa, Arabidopsis thaliana
MQRFFSARSILGYAVKTRRRSFSSRSSEFQLTTM

SEQ ID NO: 411 - DNA, 419 bp, Spinacia oleracea
gcataaacttatcttcatagttgccactccaatttgctccttgaatctcctccacccaatacataatccactcctccatcacccacttcactactaaatcaaacttaactctgtttttctctctcctcctttcatttcttattcttccaatcatcgtactccgccatgaccaccgctgtcaccgccgctgtttctttcccctctaccaaaaccacctctctctccgcccgaagctcctccgtcatttcccctgacaaaatcagctacaaaaaggtgattcccaatttcactgtgttttttattaataatttgttattttgatgatgagatgattaatttgggtgctgcaggttcctttgtactacaggaatgtatctgcaactgggaaaatgggacccatcagggcccagatcgcctct

SEQ ID NO: 412 - protein, 59 aa, Spinacia oleracea
MTTAVTAAVSFPSTKTTSLSARSSSVISPDKISYKKVPLYYRNVSATGKMGPIRAQIAS

SEQ ID NO: 413 - DNA, 900 bp, Escherichia coli
atggactttccgcagcaactcgaagcctgcgttaagcaggccaaccaggcgctgagccgttttatcgccccactgccctttcagaacactcccgtggtcgaaaccatgcagtatggcgcattattaggtggtaagcgcctgcgacctttcctggtttatgccaccggtcatatgttcggcgttagcacaaacacgctggacgcacccgctgccgccgttgagtgtatccacgcttactcattaattcatgatgatttaccggcaatggatgatgacgatctgcgtcgcggtttgccaacctgccatgtgaagtttggcgaagcaaacgcgattctcgctggcgacgctttacaaacgctggcgttctcgattttaagcgatgccgatatgccggaagtgtcggaccgcgacagaatttcgatgatttctgaactggcgagcgccagtggtattgccggaatgtgcggtggtcaggcattagatttagacgcggaaggcaaacacgtacctctggacgcgcttgagcgtattcatcgtcataaaaccggcgcattgattcgcgccgccgttcgccttggtgcattaagcgccggagataaaggacgtcgtgctctgccggtactcgacaagtatgcagagagcatcggccttgccttccaggttcaggatgacatcctggatgtggtgggagatactgcaacgttgggaaaacgccagggtgccgaccagcaacttggtaaaagtacctaccctgcacttctgggtcttgagcaagcccggaagaaagcccgggatctgatcgacgatgcccgtcagtcgctgaaacaactggctgaacagtcactcgatacctcggcactggaagcgctagcggactacatcatccagcgtaataaataa

SEQ ID NO: 414 - protein, 299 aa, Escherichia coli
MDFPQQLEACVKQANQALSRFIAPLPFQNTPVVETMQYGALLGGKRLRPFLVYATGHMFGVSTNTLDAPAAAVECIHAYSLIHDDLPAMDDDDLRRGLPTCHVKFGEANAILAGDALQTLAFSILSDADMPEVSDRDRISMISELASASGIAGMCGGQALDLDAEGKHVPLDALERIHRHKTGALIRAAVRLGALSAGDKGRRALPVLDKYAESIGLAFQVQDDILDVVGDTATLGKRQGADQQLGKSTYPALLGLEQARKKARDLIDDARQSLKQLAEQSLDTSALEALADYIIQRNK

SEQ ID NO: 415 - DNA, 1059 bp, Saccharomyces cerevisiae
atggcttcagaaaaagaaattaggagagagagattcttgaacgttttccctaaattagtagaggaattgaacgcatcgcttttggcttacggtatgcctaaggaagcatgtgactggtatgcccactcattgaactacaacactccaggcggtaagctaaatagaggtttgtccgttgtggacacgtatgctattctctccaacaagaccgttgaacaattggggcaagaagaatacgaaaaggttgccattctaggttggtgcattgagttgttgcaggcttacttcttggtcgccgatgatatgatggacaagtccattaccagaagaggccaaccatgttggtacaaggttcctgaagttggggaaattgccatcaatgacgcattcatgttagaggctgctatctacaagcttttgaaatctcacttcagaaacgaaaaatactacatagatatcaccgaattgttccatgaggtcaccttccaaaccgaattgggccaattgatggacttaatcactgcacctgaagacaaagtcgacttgagtaagttctccctaaagaagcactccttcatagttactttcaagactgcttactattctttctacttgcctgtcgcattggccatgtacgttgccggtatcacggatgaaaaggatttgaaacaagccagagatgtcttgattccattgggtgaatacttccaaattcaagatgactacttagactgcttcggtaccccagaacagatcggtaagatcggtacagatatccaagataacaaatgttcttgggtaatcaacaaggcattggaacttgcttccgcagaacaaagaaagactttagacgaaaattacggtaagaaggactcagtcgcagaagccaaatgcaaaaagattttcaatgacttgaaaattgaacagctataccacgaatatgaagagtctattgccaaggatttgaaggccaaaatttctcaggtcgatgagtctcgtggcttcaaagctgatgtcttaactgcgttcttgaacaaagtttacaagagaagcaaatag

SEQ ID NO: 416 - protein, 352 aa, Saccharomyces cerevisiae
MASEKEIRRERFLNVFPKLVEELNASLLAYGMPKEACDWYAHSLNYNTPGGKLNRGLSVVDTYAILSNKTVEQLGQEEYEKVAILGWCIELLQAYFLVADDMMDKSITRRGQPCWYKVPEVGEIAINDAFMLEAAIYKLLKSHFRNEKYYIDITELFHEVTFQTELGQLMDLITAPEDKVDLSKFSLKKHSFIVTFKTAYYSFYLPVALAMYVAGITDEKDLKQARDVLIPLGEYFQIQDDYLDCFGTPEQIGKIGTDIQDNKCSWVINKALELASAEQRKTLDENYGKKDSVAEAKCKKIFNDLKIEQLYHEYEESIAKDLKAKISQVDESRGFKADVLTAFLNKVYKRSK

SEQ ID NO: 417 - DNA, 885 bp, Brassica napus
atgtcttacatgctcagtaaagccgactccgtcaacagagccctggactccgccgtccccctccgggagccgctcaagatccacgaggcgatgcgctactccctcctcgccggcggcaaacgcgtcaggcccgtcctctgcatcgccgcctgcgagctcgtcggcggggaagagtccctcgccatgccggcggcctgcgccgtcgagatgatccacaccatgtcgctgatccacgacgacttgccgtgcatggacaacgacgacctccgccgcgggaagccgacgaaccacaaggtttacggcgaggacgtggcggtcctggccggagacgcgcttctctccttcgccttcgagcatttggcgtcggcgacgagctccgaagtttctccggcgagagtggtccgagccgtcggagagttggcgaaagctataggaaccgaagggctggtggcgggacaggtggcggatataagcagcgaaggattagagttaaacgacgtcggattggatcatttagagtttattcatttgcataaaacggcggcgttgcttgaggcttcagccgttttgggcgggatcgtcggtggagggagcgacgaggagatcgagaggctgaggaagttcgcgaggtgtatcggtctgttgtttcaggtggttgatgatatcctggacgtgaccaagtcgtctcaggagctggggaaaaccgccgggaaagatttgatcgctgataagctgacgtatccgaagctcatggggttggagaaatcgagagagttcgctgagaagttgaatagagaggcgcgtgatcagcttttggggtttgattccgacaaggttgctcctttgttggctttggctaattacattgccaatagacagaactga

SEQ ID NO: 418 - protein, 294 aa, Brassica napus
MSYMLSKADSVNRALDSAVPLREPLKIHEAMRYSLLAGGKRVRPVLCIAACELVGGEESLAMPAACAVEMIHTMSLIHDDLPCMDNDDLRRGKPTNHKVYGEDVAVLAGDALLSFAFEHLASATSSEVSPARVVRAVGELAKAIGTEGLVAGQVADISSEGLELNDVGLDHLEFIHLHKTAALLEASAVLGGIVGGGSDEEIERLRKFARCIGLLFQVVDDILDVTKSSQELGKTAGKDLIADKLTYPKLMGLEKSREFAEKLNREARDQLLGFDSDKVAPLLALANYIANRQN

SEQ ID NO: 419 - DNA, 822 bp, Brassica napus
atgctattaagcgcttcagcgactcctctccgatttggtgggcatgttcccgagaaaccctgtcgtatgcgcatgaaacaagcaattcgatcatcatcgtccaataacttcgatctgaggacgtattggacaaccctaataacggagatcaaccagaagctggacgaagcgataccagtcaagtaccctgcagggatctatgaggcgatgagatactcagtcctcgctaaaggcgccaagcgtgcccctcctgtaatgtgcgtggccgcctgcgagctcttcggtggcgatcgactcgccgctttccccaccgcatgtgcccttgaaatggtccacgcggcttcgctgattcacgatgacctcccctgtatggacgatgatcctgtccgcagaggaaagccatctaaccacactgtcttcggcgctgacatggccattctggctggtgatgccctcttcccactcggcttccagcacattgtctctctcacccctcctcaccttgttccccgatccaccatcctccgtctcatctccgagattgcccgcaccgtcggctccaccggcatggctgcagggcagtacgttgacctcgaaggaggcccctttcctatttcctttgctcaggagaagaaattcggagccatgggggagtgctcagccgtctgtggaggtctcttgggtggtgccactgacgatgagcttcagagtctcagattgtacggcagagctgttgggatgctgtatcaggtggtggatgacatcagagacgacgacaagaagagctatgcgggagtctttggttcagagagggcaatggaa

SEQ ID NO: 420 - protein, 274 aa, Brassica napus
MLLSASATPLRFGGHVPEKPCRMRMKQAIRSSSSNNFDLRTYWTTLITEINQKLDEAIPVKYPAGIYEAMRYSVLAKGAKRAPPVMCVAACELFGGDRLAAFPTACALEMVHAASLIHDDLPCMDDDPVRRGKPSNHTVFGADMAILAGDALFPLGFQHIVSLTPPHLVPRSTILRLISEIARTVGSTGMAAGQYVDLEGGPFPISFAQEKKFGAMGECSAVCGGLLGGATDDELQSLRLYGRAVGMLYQVVDDIRDDDKKSYAGVFGSERAME

SEQ ID NO: 421 - DNA, 1029 bp, Glycine max
atggcagatctcaagtccacattcttgaacgtctattctgttctcaaatctgaactcctccacgaccctgcttttgagttctccgatgatgctcgtaattgggtcgaccggatgctggactacaatgtgccgggaggaaagttgaaccggggactgtcagtaattgatagctacagattgttaaaagaaggacaggcattaaatgatgacgaaatttttcatgccagtgctcttggttggtgtattgaatggcttcaggcatattttcttgttcttgatgacattatggataactctcacacacgccgtggtcagccatgctggtttagagtgcccaaggttggaatgattgcagccaatgatggagttctactaagaaaccatattccacgtatccttaaaaagcacttcaggggaaagccatattacgttgatcttcttgatttgtttaatgaggttgagttccagactgcttcaggacagatgatagatctgatcaccacactggaaggagaaaaagacctgtctaaatacacattaacactgcatcgacgtattgttcagtacaagactgcatattattccttttaccttccggttgcatgtgcattgctcatggcgggtgaggatcttgacaaaaatgttgatgtaaagaacattcttgttgagatgggaacatactttcaagtacaggatgattatttggattgctttggtgatcctcaaacaattggaaagataggtacagatattgaagatttcaagtgctcttggttaattgtgaaagccttggaacttagtaatgaacaacaaaagaaagttctacaagagaactatggtaagccagatccagaaaatgttgctaaagtaaaggccctgtacaatgagcttaatcttcagggtgtatttgaggagtacgagagtgggagctatgcgaagcttgtatcctccattgaagctcatcctatcaaagcagttcaagctgtattgaagtcctttttggctaaaatttacaaaaggcagaagtag

SEQ ID NO: 422 - protein, 342 aa, Glycine max
MADLKSTFLNVYSVLKSELLHDPAFEFSDDARNWVDRMLDYNVPGGKLNRGLSVIDSYRLLKEGQALNDDEIFHASALGWCIEWLQAYFLVLDDIMDNSHTRRGQPCWFRVPKVGMIAANDGVLLRNHIPRILKKHFRGKPYYVDLLDLFNEVEFQTASGQMIDLITTLEGEKDLSKYTLTLHRRIVQYKTAYYSFYLPVACALLMAGEDLDKNVDVKNILVEMGTYFQVQDDYLDCFGDPQTIGKIGTDIEDFKCSWLIVKALELSNEQQKKVLQENYGKPDPENVAKVKALYNELNLQGVFEEYESGSYAKLVSSIEAHPIKAVQAVLKSFLAKIYKRQK

SEQ ID NO: 423 - DNA, 741 bp, Glycine max
atgtgcatctctgcacgcgaactctctagtggcagccgccttgccgcctttcccactgcctgtgcccttgaaatggttcatgcagcttcattgatacacgatgatcttccctgcatggatgactccccctcacgccgtggtcagccttcaaaccataccatctatggtgttgacatggcaattcttgcgggcgatgcactctttccccttggatttcgacacattgtttcacaaactccatcagaccttgtgcctgagtcgcacctccttcgtgtgattgccgagatagcccgctctgtaggatccactggaatggctgcagggcagttcctggaccttgaaggaggacccaatgcagttggatttatacaagaaaaaaagtttggtgaaatgggggagtcttctgcagtgtgtggaggattcttggctggagctgaagatgatgagatagagagactgaggaggtatgggagagctgttggggtattgtatgcagttgtggatgatattatagaagagagattgaaagttgagggagatggtgacaggaaaaacaagggtaagagttatgcagaggtttatggagttgaaaaggcaatagaaaaagctgaagagctcagagcaaaggctaaagaagaattggatggatttgagaagcatggggaacgggtctttcctctctacagttttgtggattatgcttttgatagaagtttcagtgttgatgatgccagtggataa

SEQ ID NO: 424 - protein, 222 aa, Glycine max
MVHAASLIHDDLPCMDDSPSRRGQPSNHTIYGVDMAILAGDALFPLGFRHIVSQTPSDLVPESHLLRVIAEIARSVGSTGMAAGQFLDLEGGPNAVGFIQEKKFGEMGESSAVCGGFLAGAEDDEIERLRRYGRAVGVLYAVVDDIIEERLKVEGDGDRKNKGKSYAEVYGVEKAIEKAEELRAKAKEELDGFEKHGERVFPLYSFVDYAFDRSFSVDDASG

SEQ ID NO: 425 - DNA, 786 bp, Glycine max
atgcggtactcgctcctcgccggcggcaagcgcgtgaggccggttttgtgcgtggcggcctgcgagctcgtcggcggcgaggaggccacggcgatgcccgccgcctgcgccatcgagatgatccacaccatgtcgctcatccacgatgacctcccctgcatggacaacgacgacctccgccgcggtaagcccaccaaccacaaggtcttcggcgaggacgtggcggtcctcgccggcgacgcgctcctcgccttcgcgttcgagcacgtggcagcgtccacggagggagtgtcgccgtcacgcgtggttcgagcgattggggaattagcgaagtcgatcggtacggaagggcttgtggcgggacaagtggtggatatagattcggagggggtggcgaatgtggggctggagacgctggaattcattcacgtgcacaaaacggcggcgttgctggaagctgcggttgtgttgggggcaatagtgggaggtgggagcgacgaggaggttgagaaattaaggaagttcgctaggtgcattgggttgttgtttcaggttgtggacgacattctggatgttacgaagtcgtcggaggaattggggaagacggcggggaaggatttggtggctgataaggttacttatcccaagctattggggatagataagtcaaaggaatttgctcaagaattgttaaaggatgccaaggaacaattgtctggcttcgatcctccaaaggcggctcccttgtttgcattaaccaattacattgcttataggcaaaattaa

SEQ ID NO: 426 - protein, 261 aa, Glycine max
MRYSLLAGGKRVRPVLCVAACELVGGEEATAMPAACAIEMIHTMSLIHDDLPCMDNDDLRRGKPTNHKVFGEDVAVLAGDALLAFAFEHVAASTEGVSPSRVVRAIGELAKSIGTEGLVAGQVVDIDSEGVANVGLETLEFIHVHKTAALLEAAVVLGAIVGGGSDEEVEKLRKFARCIGLLFQVVDDILDVTKSSEELGKTAGKDLVADKVTYPKLLGIDKSKEFAQELLKDAKEQLSGFDPPKAAPLFALTNYIAYRQN

SEQ ID NO: 427 - DNA, 486 bp, Triticum aestivum
atgattcacactgcgagtttaatacatgatgatgtcatagatgatagtggaatgcgcagagggaaagaaaccattcatcagctgtacggaacacggatagcggtgcttgctggcgattttatgtttgcacaatcttcttggtttctcgcaaacctagagaacattgaggttataaagctcatcagccaggtgatcaaggactttgctagtggggagataaagcagcaatcgaccctgttcgactgcgacgtcaccctggacgactacctgctcaagagctactacaagactgcctccctgctcgcttcaagcacgaggtccgcggccatattcagcggggtgagcaccgccgtatgcgagcagatgtacgagtacggcaggaacctggggctgtcgttccaggtggtggacgacatcctcgacttcacgcagtcggcggcgagctgggcaagccggcggggagcgacctggccaaggggaacctga

SEQ ID NO: 428 - protein, 161 aa, Triticum aestivum
MIHTASLIHDDVIDDSGMRRGKETIHQLYGTRIAVLAGDFMFAQSSWFLANLENIEVIKLISQVIKDFASGEIKQQSTLFDCDVTLDDYLLKSYYKTASLLASSTRSAAIFSGVSTAVCEQMYEYGRNLGLSFQVVDDILDFTQSAASWASRRGATWPRGT

SEQ ID NO: 429 - DNA, 606 bp, Triticum aestivum
atgtttcttgcctccactctcggttggtgcattgaatggcttcaagccttctctcttgtgctcgatgatatcatggacgactcccacactcgacgtgggcagccttgttggtttagggtgtctcaggttggcttgattgctgtaaatgatgggattctccttcgcaaccatatttcgagaatgcttcggctccactttaagaagaagccttactatgccgatctccttgatttattcaacgaggttgagttcaagacagcttctggtcaaatgctggatcttattacaacccacgagggagaaaaagatctaacgaaatataacattggagtccaccgccgaattgttcaattcaagacagcctactattcattttatctgccggttgcatgtgcgctgctactctctggggagagtttggagaactacggggctgtagagaacatacttgtcgagatgggaacttacttccaagttcaggatgattatctagactgttatggtgatcctgaatttattggcaagattggcaccgacattgaagattacaagtgctcctggctaggtgtccaagctcttgagcgggctgatgagagccaaaagtga

SEQ ID NO: 430 - protein, 201 aa, Triticum aestivum
MFLASTLGWCIEWLQAFSLVLDDIMDDSHTRRGQPCWFRVSQVGLIAVNDGILLRNHISRMLRLHFKKKPYYADLLDLFNEVEFKTASGQMLDLITTHEGEKDLTKYNIGVHRRIVQFKTAYYSFYLPVACALLLSGESLENYGAVENILVEMGTYFQVQDDYLDCYGDPEFIGKIGTDIEDYKCSWLGVQALERADESQK

SEQ ID NO: 431 - DNA, 738 bp, Zea mays
atgattcacactgcgagtttaatacatgatgatgtcatagatgatagtgggatgagaagagggaaggaaactattcaccaactatatggtacacgtgtggctgtacttgctggtgattttatgtttgcacaatcttcttggtttcttgcaaacctagaaaatattgaagttataaaattgatcagtcaggtcatcaaggactttgcaagcggcgagataaaacaagcttccactctttttgattgtgacatcacacttgacgactaccttctcaagagctactacaagactgcatctttgattgcagccagcacaaaatcagcttccatattcagtggcgtcagcaccactatttgtgaaaaaatgtatgcatatggcaggaatcttggtctatccttccaggttgtcgatgacatcctggatttcacccagtcagccgaacaacttggcaaaccagcagcaagtgacttggcaaagggaaacctgactgctccagtcatcttcgctttgcaaagtgaaccagagctaagggagatcattgattctgagttcagtgacacggattcgttagctactgcaatagagctcgttcatagaagtggtgggatacggagggcacatgagcttgcaagagagaagggtgacttggcaatccaaaatctgcagtgccttccaagaagtgacttcagaagtgcccttgagaagatggtggaatacaatcttgagaggattgagtag

SEQ ID NO: 432 - protein, 245 aa, Zea mays
MIHTASLIHDDVIDDSGMRRGKETIHQLYGTRVAVLAGDFMFAQSSWFLANLENIEVIKLISQVIKDFASGEIKQASTLFDCDITLDDYLLKSYYKTASLIAASTKSASIFSGVSTTICEKMYAYGRNLGLSFQVVDDILDFTQSAEQLGKPAASDLAKGNLTAPVIFALQSEPELREIIDSEFSDTDSLATAIELVHRSGGIRRAHELAREKGDLAIQNLQCLPRSDFRSALEKMVEYNLERIE

SEQ ID NO: 433 - DNA, 1053 bp, Zea mays
atggcggcgggcgggaatggcgccggcggggacaccagggcggccttcgcgcggatctacaagacgctcaaggaggagctgctcaccgacccggccttcgagttcaccgaggagtcacgccagtggatcgaccgcatggttgactacaatgtactcggaggcaagtgtaaccgtgggctctctgtggtcgacagctacaagctgctcaagggcgctgatgctctgggcgaggaggaaacgttccttgcttgcaccctcggctggtgcattgaatggcttcaggctttctttcttgtgcttgatgatatcatggatgactctcacactcgtcgcggccagccttgctggttcagggtgcctcaggttggcttaattgctgcgaatgacgggatcatccttcgcaaccatatctcacggatccttcggcgccactttaagggcaaaccttactatgctgatctccttgatttgttcaatgaggttgagttcaagacagcttcaggtcagctgctggaccttatcactacccatgagggagaaaaagatctaacaaagtataacataacagttcacggtcgaattgttcaatacaagacagcctattattcattttatctgccggttgcatgtgccctgctgctctctggcgagaatttggacaattatggtgatgtagagaacatccttgttgaaatgggaacatactttcaagtccaggatgactatctggattgttatggtgatcctgaatttatcggcaagattggaacggacattgaagattacaagtgctcatggctagttgtgcaagcccttgagcgtgctgatgagagccaaaagcgcattctatttgaaaattatggcaagaaagatccagcctgtgtggcaaaagtgaagaacctctacaaagaacttgacctagaggcggtatttcaggagtacgagaatgagagctacaagaagctgattgcagacattgaagcccagccaagcattgcggttcagaaagtgctgaaatccttcttgcacaagatctacaagaggcagaagtag

SEQ ID NO: 434 - protein, 350 aa, Zea mays
MAAGGNGAGGDTRAAFARIYKTLKEELLTDPAFEFTEESRQWIDRMVDYNVLGGKCNRGLSVVDSYKLLKGADALGEEETFLACTLGWCIEWLQAFFLVLDDIMDDSHTRRGQPCWFRVPQVGLIAANDGIILRNHISRILRRHFKGKPYYADLLDLFNEVEFKTASGQLLDLITTHEGEKDLTKYNITVHGRIVQYKTAYYSFYLPVACALLLSGENLDNYGDVENILVEMGTYFQVQDDYLDCYGDPEFIGKIGTDIEDYKCSWLVVQALERADESQKRILFENYGKKDPACVAKVKNLYKELDLEAVFQEYENESYKKLIADIEAQPSIAVQKVLKSFLHKIYKRQK

SEQ ID NO: 435 - DNA, 1327 bp, Artificial sequence
  Synthetic construct
accatgggcgtcctcggcaggtgcagaccatctggcaagttggacaccatcaaactcttcgtcggcgctagtaccatccgtaagaggttcgagactatcttccaggatggcgatcactggggaaacttcgaagagtctaggggcctggctccatctgtgaaggcagaggacggcttctctggctctaagggctactctttcggcccacagttcggctttctcctgtctaacgctaagaccggcctttggaagctgttccactgctacattgctgcaggagcttggttgaggaacgctgtgtgcgtgttctacttggtgctgaggggactccaagcagttgaggatgatctgaccatcccctacgatctgaaggttgagctgctcaggaacctgcacaagaagatcttcgatagggacttccacttcccttgcggcaacaacgactacaagctgctcaccggtaagctgtctttcacctggttctctccttcttggggtcaaccagacaccgaagaggtgatcaccgagatcaccgagcgtatgggagaaggcatggtcaagtacctgaacaccgagatcatcagtcgcgaggattacaacgagtactgccacttctctgctgggttgatgggtttgggtctgaccaggatcttctacaccgctggaatggaacagttcaccccagattacctgtctaacgcaatgggcctcttcctccagaagaccaacgtgatcagggattacctggagaacatcaacgctcagcctacttctaggctgaggtggccaaaagaggtgtggtcaaagtacgctgataagcctgaggctttcatggacgagaccaactacaagcagggattgcactgcctgaacgagatggttaccgatgcactttcacacgggctggattgccttcactacatggctgcactccaggatcagccaaacctgaggttttgcgctaccttccagatcaccgcactgggtacacttgcaatgtgctacaacaacgtcgaggtgtttaggggctctgttcgtatgaggaggggactcacagcaaagaatccaaggtgcgaagagcacggaaggtgtttgtggagagtgtacgatagccctgcaaactgctgtcaggatcaggataggcctagtgccgtgactatcacctctcagaccatgatcccaagcatctggcgcttcgagtctaagagggggttccacaggatcagcggctatcacctcaagtccccttacaggccaatgctgatcatgatcgtcctgctcttggtggctatactgttcggcgtgatgttctagactaatcagttag

SEQ ID NO: 436 - protein, 436 aa, Artificial sequence
  Synthetic construct
MGVLGRCRPSGKLDTIKLFVGASTIRKRFETIFQDGDHWGNFEESRGLAPSVKAEDGFSGSKGYSFGPQFGFLLSNAKTGLWKLFHCYIAAGAWLRNAVCVFYLVLRGLQAVEDDLTIPYDLKVELLRNLHKKIFDRDFHFPCGNNDYKLLTGKLSFTWFSPSWGQPDTEEVITEITERMGEGMVKYLNTEIISREDYNEYCHFSAGLMGLGLTRIFYTAGMEQFTPDYLSNAMGLFLQKTNVIRDYLENINAQPTSRLRWPKEVWSKYADKPEAFMDETNYKQGLHCLNEMVTDALSHGLDCLHYMAALQDQPNLRFCATFQITALGTLAMCYNNVEVFRGSVRMRRGLTAKNPRCEEHGRCLWRVYDSPANCCQDQDRPSAVTITSQTMIPSIWRFESKRGFHRISGYHLKSPYRPMLIMIVLLLVAILFGVMF

SEQ ID NO: 437 - DNA, 1327 bp, Artificial sequence
  Synthetic construct
accatgggcgtcctcggcaggtgcagaccatctggcaagttggacaccatcaaactcttcgtcggcgctagtaccatccgtaagaggttcgagactatcttccaggatggcgatcactggggaaacttcgaagagtctaggggcctggctccatctgtgaaggcagaggacggcttctctggctctaagggctactctttcggcccacagttcggctttctcctgtctaacgctaagaccggcctttggaagctgttccactgctacattgctgcaggagcttggttgaggaacgctgtgtgcgtgttctacttggtgctgaggggactcgacaccgttgaggatgatctgaccatcccctacgatctgaaggttgagctgctcaggaacctgcacaagaagatcttcgatagggacttccacttcccttgcggcaacaacgactacaagctgctcaccggtaagctgtctttcacctggttctctccttcttggggtcaaccagacaccgaagaggtgatcaccgagatcaccgagcgtatgggagaaggcatggtcaagtacctgaacaccgagatcatcagtcgcgaggattacaacgagtactgccacttctctgctgggttggtcggtttgggtctgaccaggatcttctacaccgctggaatggaacagttcaccccagattacctgtctaacgcaatgggcctcttcctccagaagaccaacattatcagggattacctggaggacatcaacgctcagcctacttctaggctgttctggccaaaagaggtgtggtcaaagtacgctgataagcctgaggctttcatggacgagaccaactacaagcagggattgcactgcctgaacgagatggttaccgatgcactttcacacgggctggattgccttcactacatggctgcactccaggatcagccaaacctgaggttttgcgctaccttccagatcaccgcactgggtacacttgcaatgtgctacaacaacgtcgaggtgtttaggggctctgttcgtatgaggaggggactcacagcaaagaatccaaggtgcgaagagcacggaaggtgtttgtggagagtgtacgatagccctgcaaactgctgtcaggatcaggataggcctagtgccgtgactatcacctctcagaccatgatcccaagcatctggcgcttcgagtctaagagggggttccacaggatcagcggctatcacctcaagtccccttacaggccaatgctgatcatgatcgtcctgctcttggtggctatactgttcggcgtgatgttctagactaatcagttag

SEQ ID NO: 438 - protein, 436 aa, Artificial sequence
  Synthetic construct
MGVLGRCRPSGKLDTIKLFVGASTIRKRFETIFQDGDHWGNFEESRGLAPSVKAEDGFSGSKGYSFGPQFGFLLSNAKTGLWKLFHCYIAAGAWLRNAVCVFYLVLRGLDTVEDDLTIPYDLKVELLRNLHKKIFDRDFHFPCGNNDYKLLTGKLSFTWFSPSWGQPDTEEVITEITERMGEGMVKYLNTEIISREDYNEYCHFSAGLVGLGLTRIFYTAGMEQFTPDYLSNAMGLFLQKTNIIRDYLEDINAQPTSRLFWPKEVWSKYADKPEAFMDETNYKQGLHCLNEMVTDALSHGLDCLHYMAALQDQPNLRFCATFQITALGTLAMCYNNVEVFRGSVRMRRGLTAKNPRCEEHGRCLWRVYDSPANCCQDQDRPSAVTITSQTMIPSIWRFESKRGFHRISGYHLKSPYRPMLIMIVLLLVAILFGVMF

SEQ ID NO: 439 - DNA, 1072 bp, Brassica napus
atggggagcttggggacgtttctgagatatcctgatgatgtatatcctctcttgaagatgaaaagagcgatcgagaaagcggagaagcagatccctcccgagccacactggggtttctgctattcaatgctccacaaggtttctcggagcttctctctcgttattcagcaactaggtaccgacctccgtaacgctgtgtgtgtgttctacttggttctccgagctcttgatactgtcgaggatgacacaagcataccaactgatgagaagctgcccatcttgattgccttccaccgtcacatctacgatactgactggcactattcatgtggcacgaaggagtacaaggttctgatggaccaatttcaccatgttgctgcagcttttctggaacttgaaaaagggtatcaagaggctatcgaggaaattactaaaagaatgggtgcaggaatggccaagtttatctgccaagaggtagaaactgttgatgactacgatgagtactgccactatgttgctggacttgtgggtttaggtctctctaaactcttcctcgcttccggatcagaagttttgacgccagattgggagcatatttccaattcaatgggtttatttcttcagaaaacaaacattatcagagattatcttgaggacattaatgaaataccaaagtcccgcatgttttggcctcgcaagatttggggcaaatatgctggcaagctcgaggacttgaaatacgagaagaactcaagcaatgcagtgcagtgcttgaatgaaatggtcaccaatgctttgacgcatattgaagattgcctcaaatacatggctgccttgcgtgatccttctatttttcggttctgtgctatccctcagatcatggcgattggaacacttgcgctatgctataacaatgtgcaagtatttagaggcgttgtgaaattgaggcgaggtcttactgctaaagtgattgatcggacaaagacaatggctgatgtctatggtgccttctatgatttttcttgtatgctgaaaacaaaggttgacaagaacgatccacatgctagtaaga

SEQ ID NO: 440 - protein, 357 aa, Brassica napus
MGSLGTFLRYPDDVYPLLKMKRAIEKAEKQIPPEPHWGFCYSMLHKVSRSFSLVIQQLGTDLRNAVCVFYLVLRALDTVEDDTSIPTDEKLPILIAFHRHIYDTDWHYSCGTKEYKVLMDQFHHVAAAFLELEKGYQEAIEEITKRMGAGMAKFICQEVETVDDYDEYCHYVAGLVGLGLSKLFLASGSEVLTPDWEHISNSMGLFLQKTNIIRDYLEDINEIPKSRMFWPRKIWGKYAGKLEDLKYEKNSSNAVQCLNEMVTNALTHIEDCLKYMAALRDPSIFRFCAIPQIMAIGTLALCYNNVQVFRGVVKLRRGLTAKVIDRTKTMADVYGAFYDFSCMLKTKVDKNDPHASK

SEQ ID NO: 441 - DNA, 1242 bp, Glycine max
atgggaagtttgggagcgattctgaagaatccagatgacttttaccctctgctgaagctgaaaatggcggcgagaaacgccgagaagcagatcccgccggagccacattgggcgttctgctacacaatgctccacaaggtttctcgaagtttcgccctcgtcattcagcaactcggcaccgagcttcgcaacgccgtttgcatattttatttggttctgcgagctctcgacaccgttgaggatgatactagcatagaaacagatgtcaaggtgccaatactgatagcctttcaccgtcatatttatgatcgtgattggcacttttcatgtggcacaaaggagtacaaagttctaatggaccagtttcatcatgtttcaactgcttttctggaacttggaaagaactaccaggaagcaattgaggacattaccaaaagaatgggtgctggaatggccaaatttatttgcaaggaggtagaaacaattgatgactatgatgaatattgtcactatgtggcgggacttgttgggctgggtttatcaaagcttttccatgcgtctggttcagaagatctggctccagatgacctttccaattcaatgggcttgtttctacagaaaacaaacattattcgagattatctggaagacatcaatgagatccccaagtcacgcatgttttggccacgacagatttggagtgaatatgttaacaaacttgaggatttgaaatatgaggagaactctgttaaggcagtgcaatgcttaaatgacatggtcactaatgctctgatgcatgctgaagattgcttaaaatacatggctgctttacgtgacccgcctatatttcgcttttgtgctataccccagataatggcaattggaacacttgcattatgctacaacaacattgaggtcttcagaggtgtagttaaaatgaggcgaggtttaactgccaaagtgattgaccgaacaaagactatggctgatgtctacggtgctttttttgattttgcttctatgttggagcccaaggttgacaaaaacgatcccaatgcaacaaaaacattgagcaggctggaagctatacagaaaacttgcagagaatctggtctcttaagtaaaaggaaatcttacattgtgaatgatgaaagtggatatggctcaaccatgattgtcatattggtcatcatggtttccatcatttttgcttatctgtctgctaaccaccataatagctag

SEQ ID NO: 442 - protein, 413 aa, Glycine max
MGSLGAILKNPDDFYPLLKLKMAARNAEKQIPPEPHWAFCYTMLHKVSRSFALVIQQLGTELRNAVCIFYLVLRALDTVEDDTSIETDVKVPILIAFHRHIYDRDWHFSCGTKEYKVLMDQFHHVSTAFLELGKNYQEAIEDITKRMGAGMAKFICKEVETIDDYDEYCHYVAGLVGLGLSKLFHASGSEDLAPDDLSNSMGLFLQKTNIIRDYLEDINEIPKSRMFWPRQIWSEYVNKLEDLKYEENSVKAVQCLNDMVTNALMHAEDCLKYMAALRDPPIFRFCAIPQIMAIGTLALCYNNIEVFRGVVKMRRGLTAKVIDRTKTMADVYGAFFDFASMLEPKVDKNDPNATKTLSRLEAIQKTCRESGLLSKRKSYIVNDESGYGSTMIVILVIMVSIIFAYLSANHHNS

SEQ ID NO: 443 - DNA, 1206 bp, Zea mays
atgggggcgctgtcgcggccggaggaggtgctggcgctggtaaagctgcgggtggcggcggggcagatcaagcgccagatcccgcccgaggagcactgggccttcgcctactccatgctccagaaggtgtcccgtagcttcgctctcgtcatccagcagctcggacccgaactccgcaatgccgtgtgcatcttctacctcgtgctccgtgccctcgacaccgttgaggacgacactagcatcccgaccgaggtgaaggtgcccatcctccaggaattctaccggcacatctacaaccgcgactggcattattcgtgtggaacaaatcactacaaaatgctaatggataagtttcgccacgtatccactgccttcctggagcttggtgaaggttaccaaaaggcaatagaagaagtcactaggcgaatgggtgcaggaatggcaaaatttatatgcaaagaggttgaaactgttgatgactatgacgagtattgtcactatgtagctgggctagttggttatggactttccaggctcttctatgctgctgggacggaagatctggctctagattcactgtcaaattcaatgggcctatttttacagaaaactaacataattagggactatttggaggacataaatgagataccaaagtcccgcatgttctggcctcgagagatatggagtaaatatgcagataaacttgaggacttcaaatatgaggagaactccaaaaaagcagtacaatgcttgaacaatatggtgactgatgcactgattcatgctgaagagtgccttcagtacatgtcagccttgaaggatcctgccattttccgtttttgtgcaataccccagataatggcaattggaacatgtgctctttgctacaataacgtgcatgtcttcagaggagttgtgaagatgagacgtggtctcacggcacgaataattgacgagacaaactcaatgacagatgtctatactgctttctatgagttttcttcattgatagagtcaaagattgatgacagtgatccaaatgctgctctaacacagagacgtgtggattcaataaagcaaacttgcaagtcatctggtttggtaaagcaaagggggtaccatttggagaagtcaccttacaggcctatgctgatcatgattgtcctcctgctggtagctattcttttcggggtaatgttctag

SEQ ID NO: 444 - protein, 401 aa, Zea mays
MGALSRPEEVLALVKLRVAAGQIKRQIPPEEHWAFAYSMLQKVSRSFALVIQQLGPELRNAVCIFYLVLRALDTVEDDTSIPTEVKVPILQEFYRHIYNRDWHYSCGTNHYKMLMDKFRHVSTAFLELGEGYQKAIEEVTRRMGAGMAKFICKEVETVDDYDEYCHYVAGLVGYGLSRLFYAAGTEDLALDSLSNSMGLFLQKTNIIRDYLEDINEIPKSRMFWPREIWSKYADKLEDFKYEENSKKAVQCLNNMVTDALIHAEECLQYMSALKDPAIFRFCAIPQIMAIGTCALCYNNVHVFRGVVKMRRGLTARIIDETNSMTDVYTAFYEFSSLIESKIDDSDPNAALTQRRVDSIKQTCKSSGLVKQRGYHLEKSPYRPMLIMIVLLLVAILFGVMF

SEQ ID NO: 445 - DNA, 1491 bp, Saccharomyces cerevisiae
atgtctgctgttaacgttgcacctgaattgattaatgccgacaacacaattacctacgatgcgattgtcatcggtgctggtgttatcggtccatgtgttgctactggtctagcaagaaagggtaagaaagttcttatcgtagaacgtgactgggctatgcctgatagaattgttggtgaattgatgcaaccaggtggtgttagagcattgagaagtctgggtatgattcaatctatcaacaacatcgaagcatatcctgttaccggttataccgtctttttcaacggcgaacaagttgatattccatacccttacaaggccgatatccctaaagttgaaaaattgaaggacttggtcaaagatggtaatgacaaggtcttggaagacagcactattcacatcaaggattacgaagatgatgaaagagaaaggggtgttgcttttgttcatggtagattcttgaacaacttgagaaacattactgctcaagagccaaatgttactagagtgcaaggtaactgtattgagatattgaaggatgaaaagaatgaggttgttggtgccaaggttgacattgatggccgtggcaaggtggaattcaaagcccacttgacatttatctgtgacggtatcttttcacgtttcagaaaggaattgcacccagaccatgttccaactgtcggttcttcgtttgtcggtatgtctttgttcaatgctaagaatcctgctcctatgcacggtcacgttattcttggtagtgatcatatgccaatcttggtttaccaaatcagtccagaagaaacaagaatcctttgtgcttacaactctccaaaggtcccagctgatatcaagagttggatgattaaggatgtccaacctttcattccaaagagtctacgtccttcatttgatgaagccgtcagccaaggtaaatttagagctatgccaaactcctacttgccagctagacaaaacgacgtcactggtatgtgtgttatcggtgacgctctaaatatgagacatccattgactggtggtggtatgactgtcggtttgcatgatgttgtcttgttgattaagaaaataggtgacctagacttcagcgaccgtgaaaaggttttggatgaattactagactaccatttcgaaagaaagagttacgattccgttattaacgttttgtcagtggctttgtattctttgttcgctgctgacagcgataacttgaaggcattacaaaaaggttgtttcaaatatttccaaagaggtggcgattgtgtcaacaaacccgttgaatttctgtctggtgtcttgccaaagcctttgcaattgaccagggttttcttcgctgtcgctttttacaccatttacttgaacatggaagaacgtggtttcttgggattaccaatggctttattggaaggtattatgattttgatcacagctattagagtattcaccccatttttgtttggtgagttgattggttaa

SEQ ID NO: 446 - protein, 496 aa, Saccharomyces cerevisiae
MSAVNVAPELINADNTITYDAIVIGAGVIGPCVATGLARKGKKVLIVERDWAMPDRIVGELMQPGGVRALRSLGMIQSINNIEAYPVTGYTVFFNGEQVDIPYPYKADIPKVEKLKDLVKDGNDKVLEDSTIHIKDYEDDERERGVAFVHGRFLNNLRNITAQEPNVTRVQGNCIEILKDEKNEVVGAKVDIDGRGKVEFKAHLTFICDGIFSRFRKELHPDHVPTVGSSFVGMSLFNAKNPAPMHGHVILGSDHMPILVYQISPEETRILCAYNSPKVPADIKSWMIKDVQPFIPKSLRPSFDEAVSQGKFRAMPNSYLPARQNDVTGMCVIGDALNMRHPLTGGGMTVGLHDVVLLIKKIGDLDFSDREKVLDELLDYHFERKSYDSVINVLSVALYSLFAADSDNLKALQKGCFKYFQRGGDCVNKPVEFLSGVLPKPLQLTRVFFAVAFYTIYLNMEERGFLGLPMALLEGIMILITAIRVFTPFLFGELIG

SEQ ID NO: 447 - DNA, 1539 bp, Brassica napus
atggaagtttttttatggacgctacttgccttcgtactgacttggacgacataccacgtcaccaacaggaggaagaaggcaacgaagttggcggatgtggccgtggaggagatacgatacggtggtcctgacgtcatcatcgtcggagctggtgttggcggctcagctctcgcctatgctcttgctaaggatggacgtcgagtacatgtgatagagagggacatgagagagccagagagaatgatgggggagtttatgcagccaggaggacgactctttctttctaagcttgatcttcaagattgtttggagggaatagacgcacagaaagccaccggcttgacactttacaaggatggaaaagaagccgcctcaccttttccggtggaggacaacaacttcccttatgaaccatctgctcgaatgttttacaatggccgttttgtccagagactgcgccaaaaggcctcttctcttcccaatgtgcgactagaagaagggacggtgagatctttgatagaagaaaaaggagtaatcaaaggagtgacatacaagaacagtttaggcgaagaatcgaccgcctttgcacctctcactgtggtatgcgacggttgctactcgaaccttcgtcgctctctaaacgacaacaatgcggaggttatttcgtacacagttggttacgtctcaaagaattgtcgccttgaagaacccgagaagttacacttaataatggcaaaaccgtcgttcaccatgttgtatcaaatcagcagcaccgacgttcgttgtggttttgagcttttctctaattattttccttcaattgccaatggggagatggcttccttcgtgaagaacgatcttgctcctcaggtacctccaaaactccgcaaaatatttttgaaagggattgaagagggagcaaaaataaaagtgacgccagcaaagagaatgtcagctaccttgagcagaaaaaaaggagtgatcgtcttgggagatgcatttaacatgcgtcatccagcaatcgcatctggaatgatggttttattgtctgacattctcattttacgccgtcttctcaaaccattgagaaacctcggtgatgccaacaaagtatcagaagttattaaatgcttttatgtaatacgcaagatgtcagcaacagtgaacacactagggaatgcattttcacaagtgctagttgcatcaacggaccaagcaaaagaggcgatgcgacagggctgttttgattacctctctagtggtgggtttcgcacgtcaggcatgatggctctgctcggtggcatgaaccctcgcccactctctctcatctttcatctatgtggtattactctatcctccattggtcaactgctctctccatttccatctcctcttggcatttggcatagcctcagactttttggtttgtctattaaaatgttggttcctcatcttaaggctgaaggagttagccaaatgctgtctccagcatacgcagccgcgtatcgcaaaagctatatggccgcaaccgctctctaa

SEQ ID NO: 448 - protein, 512 aa, Brassica napus
MEVFLWTLLAFVLTWTTYHVTNRRKKATKLADVAVEEIRYGGPDVIIVGAGVGGSALAYALAKDGRRVHVIERDMREPERMMGEFMQPGGRLFLSKLDLQDCLEGIDAQKATGLTLYKDGKEAASPFPVEDNNFPYEPSARMFYNGRFVQRLRQKASSLPNVRLEEGTVRSLIEEKGVIKGVTYKNSLGEESTAFAPLTVVCDGCYSNLRRSLNDNNAEVISYTVGYVSKNCRLEEPEKLHLIMAKPSFTMLYQISSTDVRCGFELFSNYFPSIANGEMASFVKNDLAPQVPPKLRKIFLKGIEEGAKIKVTPAKRMSATLSRKKGVIVLGDAFNMRHPAIASGMMVLLSDILILRRLLKPLRNLGDANKVSEVIKCFYVIRKMSATVNTLGNAFSQVLVASTDQAKEAMRQGCFDYLSSGGFRTSGMMALLGGMNPRPLSLIFHLCGITLSSIGQLLSPFPSPLGIWHSLRLFGLSIKMLVPHLKAEGVSQMLSPAYAAAYRKSYMAATAL

SEQ ID NO: 449 - DNA, 1590 bp, Zea mays
atggctgctacggccgccgccgctggcgtcgagttcccgctcattggcgttgccgtggccacgctcatcgtgacggtccttgtcgcggccgtgatgcgccgccgccgccgtccctggcaccaggcgcctctggtggaggggaaacccgcaccagaggcaggctgcgcggtcagcgatggcgggacggacgtcatcatcgtcggcgccggggtagctggatctgcgctggcatacacgctcggaaaggatggccgtcgggtgcatgtcatcgagagggatctgacagaacctgacagaattgtgggcgagctgttgcaacctgggggttacttgaaattaattgagctgggcctccaagattgtgtggaagaaattgatgcccaacgcgtgcttggttacgcattattcaaagatggaaggaacacaaagcttgcttatcccctggagaagttccattctgatgttgctggtaggagctttcacaatgggaggtttatacagaggatgcgtcaaaaagctgcgtctttgcccaatgtccaattagagcaaggaactgttacctcacttcttgaagaaaatggtactgttaaaggtgttcaatacaaaaccaagtcaggtgaagaactaaaggcttatgcgcccttgacgattgtatgtgatggctgcttttcgaatctacgacgcgccctttgctctccaaaggttgatgtcccatcatgttttgttgggctggtattggagaactgccaacttccacacccaaaccatggccatgttatcttggccaatccttctccaatcttattttacccaattagcagcacagaggtgcgctgtttggttgatgtccctggtcagaaggtgccttccatagctaccggtgaaatggcaaactatctcaaaactgttgttgcaccccagattcctccagaaatctatgactctttcatagcagccattgataagggaagcatacggacaatgccaaacaggagcatgccagcggctccacatccgacccctggtgcacttctgatgggggatgcgttcaatatgagacaccctttaactggtggaggaatgactgttgcattatctgacatcgttgtcctgcgtaatctgctcaagcctctccgcaatcttcatgacgcatcttccctgtgcaagtaccttgaatcgttctatacactgcggaagccggttgcttccacaataaacacattggccggtgctctgtacaaggtcttcagtgcctcgcctgatcaagctaggaatgagatgcgccaggcttgttttgattacttgagcctcggaggcgtcttctcgaacgggcctatcgctttactctctggccttaaccctcggccactgagtttagttgcgcacttctttgctgttgctatctacggtgtcggccgcttgatgctccctcttccttcacctaaacgaatgtggattggagctagactgatttctggtgcatgcggcatcatcctccctatcatcaaagctgaaggcgtgagacagatgttcttccctgctacagtacccgcatattaccgggccgcacctacgggagaaaaggcatga

SEQ ID NO: 450 - protein, 529 aa, Zea mays
MAATAAAAGVEFPLIGVAVATLIVTVLVAAVMRRRRRPWHQAPLVEGKPAPEAGCAVSDGGTDVIIVGAGVAGSALAYTLGKDGRRVHVIERDLTEPDRIVGELLQPGGYLKLIELGLQDCVEEIDAQRVLGYALFKDGRNTKLAYPLEKFHSDVAGRSFHNGRFIQRMRQKAASLPNVQLEQGTVTSLLEENGTVKGVQYKTKSGEELKAYAPLTIVCDGCFSNLRRALCSPKVDVPSCFVGLVLENCQLPHPNHGHVILANPSPILFYPISSTEVRCLVDVPGQKVPSIATGEMANYLKTVVAPQIPPEIYDSFIAAIDKGSIRTMPNRSMPAAPHPTPGALLMGDAFNMRHPLTGGGMTVALSDIVVLRNLLKPLRNLHDASSLCKYLESFYTLRKPVASTINTLAGALYKVFSASPDQARNEMRQACFDYLSLGGVFSNGPIALLSGLNPRPLSLVAHFFAVAIYGVGRLMLPLPSPKRMWIGARLISGACGIILPIIKAEGVRQMFFPATVPAYYRAAPTGEKA

SEQ ID NO: 451 - DNA, 674 bp, Vicia faba; identical to SEQ ID NO: 403

SEQ ID NO: 452 - DNA, 695 bp, Vicia faba; identical to SEQ ID NO: 404

SEQ ID NO: 453 - DNA, 1112 bp, Artificial sequence; identical to SEQ ID NO: 405
  Promoter

SEQ ID NO: 454 - DNA, 986 bp, Petroselinum crispum; identical to SEQ ID NO: 406

SEQ ID NO: 455 - DNA, 102 bp, Arabidopsis thaliana; identical to SEQ ID NO: 407

SEQ ID NO: 456 - protein, 34 aa, Arabidopsis thaliana; identical to SEQ ID NO: 408

SEQ ID NO: 457 - DNA, 102 bp, Arabidopsis thaliana; identical to SEQ ID NO: 409

SEQ ID NO: 458 - protein, 34 aa, Arabidopsis thaliana; identical to SEQ ID NO: 410

SEQ ID NO: 459 - DNA, 419 bp, Spinacia oleracea; identical to SEQ ID NO: 411

SEQ ID NO: 460 - protein, 59 aa, Spinacia oleracea; identical to SEQ ID NO: 412

SEQ ID NO: 461 - protein, 12 aa, Artificial sequence
  Motif
DRIVGELMQPGG

SEQ ID NO: 462 - protein, 17 aa, Artificial sequence
  Motif
  misc_feature (3)..(4): Xaa can be any naturally occurring amino acid
GDXXNMRHPLTGGGMTV

SEQ ID NO: 463 - protein, 406 aa, Physcomitrella patens
MGIIGAILKNPEDLHHLLKLKMASAAANRAIPSDPNLAFCYQMLRRVSGSFSIVILQLEPGLRNAVCVFYLVLRGLQAVEDDLTIPYDLKVELLRNLHKKIFDRDFHFPCGNNDYKLLMDKFYLVILAFLGLTTGYQEVITEITERMGEGMVKYLNTEIISREDYNEYCHFSAGLMGLGLTRIFYTAGMEQFTPDYLSNAMGLFLQKTNVIRDYLENINAQPTSRLRWPKEVWSKYADKPEAFMDETNYKQGLHCLNEMVTDALSHGLDCLHYMAALQDQPNLRFCATFQITALGTLAMCYNNVEVFRGSVRMRRGLTAKILDVKNMVDVYGAFYDFTRLIAAKIDKTDPSAVTTHKFVDDIRSICRFEIKNRRAFTIESKFGHETFLVVALFVILVIMLLIVTKQ

SEQ ID NO: 464 - protein, 413 aa, Glycine max
MGSLGAILKHPDDFYPLLKLKMAARNAEKQIPPEPHWAFCYTMLHKVSRSFALVIQQLGIELRNAVCIFYLVLRALDTVEDDTSIETDVKVPILIAFHRHIYDRDWHFSCGTKEYKVLMDQFHHVSTAFLELGKNYQEAIEDITKRMGAGMAKFICKEVETIDDYDEYCHYVAGLVGLGLSKLFHASGSEDLAPDDLSNSMGLFLQKTNIIRDYLEDINEIPKSRMFWPRQIWSEYVNKLEDLKYEENSVKAVQCLNDMVTNALMHPEDCLKYMAALRDPPIFRFCAIPQIMAIGTLALCYNNIEVFRGVVKMRRGLTAKVIDRTKTMADVYGAFFDFASMLEPKVDKNDPNATKTLSRLEAIQKTCRESGLLSKRKSYIVNDESGYGSTMIVILVIMVSIIFAYLSANHHNS

SEQ ID NO: 465 - protein, 413 aa, Lotus corniculatus
MGSLGAIVKHPDDLYPLLKLKMAARHAEKQIPSEPHWGFCYSMLHKVSRSFALVIQQLDTDLRNAVCIFYLVLRALDTVEDDTSIATEVKVPILKAFHRHIYDRDWHFSCGTKEYKVLMGQFHLVSTAFLELAKNYQEAIEDITDRMGAGMAKFICKEVETIDDYDEYCHYVAGLVGLGLSKLFHASGKENLAADSLSNSMGLFLQKTNIIRDYLEDINEIPKSRMFWPRQIWSKYVNKLEDLKYEENSVKAVQCLNDMVTNALMHAEDCLKYMSDLRDDSIFRFCAIPQIMAIGTLAICYNNVEVFRGVVKMRRGLTAKVIDRTKTIADVYGAFFDFASMLESKVDKNDPNATKTLSRLVAIQKTCRESGLLNKRKSYILRKENGYGSTLIIILVLLFSIMFAYSSATRHSN

SEQ ID NO: 466 - protein, 401 aa, Zea mays; identical to SEQ ID NO: 444

SEQ ID NO: 467 - protein, 410 aa, Oryza sativa
MGVVGALLGPEAEALVRLRAAAWRLRREVAAATDDDEHWAFAYSMLHRVSRSFAIVIQQLGPDLRNAVCVFYLVLRALDTVEDDTSIPTEIKVPILQEFHRHIYNRDWHFSCGTKDCKILMDKFHYVLTAFLELGSGYQEAIEEITRRMGAGMAKFICKEVETVDDYDEYCHYVAGLVGIGLSRLFHAAGLEDLAPESLSNSMGLFLQKVNITRDYLEDINEIPKSRMFWPREIWSKYVDKLEDLKYENNSVKAVKCLNEMVTNGLIHTEDCLRYMSALKDITILRFCAIPQVMALATYALCYNNVNVFRGVVKLRRGLTARIINETNSMADVYTAFYEFSSLLAEKIDDNDPNASLTRKRVNAIKETCKSSGLLKIRGYDLDRPKRNPAMIMMLLLLLVAIFLGALYRR

SEQ ID NO: 468 - protein, 444 aa, Saccharomyces cerevisiae
MGKLLQLALHPVEMKAALKLKFCRTPLFSIYDQSTSPYLLHCFELLNLTSRSFAAVIRELHPELRNCVTLFYLILRALDTIEDDMSIEHDLKIDLLRHFHEKLLLTKWSFDGNAPDVKDRAVLTDFESILIEFHKLKPEYQEVIKEITEKMGNGMADYILDENYNLNGLQTVHDYDVYCHYVAGLVGDGLTRLIVIAKFANESLYSNEQLYESMGLFLQKTNIIRDYNEDLVDGRSFWPKEIWSQYAPQLKDFMKPENEQLGLDCINHLVLNALSHVIDVLTYLAGIHEQSTFQFCAIPQVMAIATLALVFNNREVLHGNVKIRKGTTCYLILKSRTLRGCVEIFDYYLRDIKSKLAVQDPNFLKLNIQISKIEQFMEEMYQDKLPPNVKPNETPIFLKVKERSRYDDELVPTQQEEEYKFNMVLSIILSVLLGFYYIYTLHRA

1. A transgenic plant transformed with an expression cassette comprising a polynucleotide encoding a full-length polypeptide
a) having mitogen activated protein kinase activity, wherein the polypeptide comprises a domain having a sequence selected from the group consisting of amino acids 42 to 329 of SEQ ID NO:4; amino acids 32 to 319 of SEQ ID NO:2; amino acids 32 to 319 of SEQ ID NO:6; amino acids 32 to 310 of SEQ ID NO:8; amino acids 32 to 319 of SEQ ID NO:10; amino acids 32 to 319 of SEQ ID NO:12; amino acids 28 to 318 of SEQ ID NO:14; amino acids 32 to 326 of SEQ ID NO:16; amino acids 38 to 325 of SEQ ID NO:18; amino acids 44 to 331 of SEQ ID NO:20; amino acids 40 to 357 of SEQ ID NO:22; amino acids 60 to 346 of SEQ ID NO:24; amino acids 74 to 360 of SEQ ID NO:26; and amino acids 47 to 334 of SEQ ID NO:28 amino acids 47 to 334 of SEQ ID NO:28; amino acids 38 to 325 of SEQ ID NO:30; amino acids 32 to 319 of SEQ ID NO:32; amino acids 41 to 327 of SEQ ID NO:34; amino acids 43 to 329 of SEQ ID NO:36; and amino acids 58 to 344 of SEQ ID NO:38, or
b) having phospholipid hydroperoxide glutathione peroxidase activity, wherein the polypeptide comprises a glutathione peroxidase domain selected from the group consisting of 9 to 117 of SEQ ID NO:102; amino acids 17 to 125 of SEQ ID NO:104; amino acids 79 to 187 of SEQ ID NO:106; amino acids 10 to 118 of SEQ ID NO:108; amino acids 12 to 120 of SEQ ID NO:110; amino acids 9 to 117 of SEQ ID NO:112; amino acids 9 to 117 of SEQ ID NO:114; amino acids 10 to 118 of SEQ ID NO:116; amino acids 9 to 117 of SEQ ID NO:118; amino acids 77 to 185 of SEQ ID NO:120; amino acids 12 to 120 of SEQ ID NO:122; amino acids 12 to 120 of SEQ ID NO:124; amino acids 12 to 120 of SEQ ID NO:126; amino acids 12 to 120 of SEQ ID NO:128; amino acids 10 to 118 of SEQ ID NO:130; amino acids 70 to 178 of SEQ ID NO:132; amino acids 10 to 118 of SEQ ID NO:134; and amino acids 24 to 132 of SEQ ID NO:136, or
c) comprising a TCP family transcription factor domain having a sequence selected from the group consisting of amino acids 57 to 249 of SEQ ID NO:138; amino acids 54 to 237 of SEQ ID NO:140; amino acids 43 to 323 of SEQ ID NO:142; or amino acids 41 to 262 of SEQ ID NO:144, or
d) comprising an AP2 domain having a sequence at least 64% identical to amino acids 44 to 99 of SEQ ID NO:208, or
e) comprising a polynucleotide encoding a full-length brassinosteroid biosynthetic LKB-like polypeptide selected from the group consisting of amino acids 1 to 566 of SEQ ID NO:254, CAN79299, AAK15493, P93472, AAM47602, and AAL91175, or
f) comprising, in operative association i) an isolated polynucleotide encoding a promoter capable of enhancing gene expression in leaves; and ii) an isolated polynucleotide encoding a full-length polypeptide which is a long-chain-fatty-acid-CoA ligase subunit of acyl-CoA synthetase; wherein the transgenic plant demonstrates increased yield as compared to a wild type plant of the same variety which does not comprise the expression cassette, or
g) comprising, in operative association, i) an isolated polynucleotide encoding a promoter capable of enhancing gene expression in leaves; ii) an isolated polynucleotide encoding a mitochondrial transit peptide; and iii) an isolated polynucleotide encoding a full-length farnesyl diphosphate synthase polypeptide; wherein the transgenic plant demonstrates increased yield as compared to a wild type plant of the same variety which does not comprise the expression cassette.

2. The transgenic plant of claim 1, wherein the polypeptide having mitogen activated protein kinase activity comprises amino acids 1 to 376 of SEQ ID NO:4; amino acids 1 to 368 of SEQ ID NO:2; amino acids 1 to 368 of SEQ ID NO:6; amino acids 1 to 369 of SEQ ID NO:8; amino acids 1 to 371 of SEQ ID NO:10; amino acids 1 to 375 of SEQ ID NO:12; amino acids 1 to 523 of SEQ ID NO:14; amino acids 1 to 494 of SEQ ID NO:16; amino acids 1 to 373 of SEQ ID NO:18; amino acids 1 to 377 of SEQ ID NO:20; amino acids 1 to 404 of SEQ ID NO:22; amino acids 1 to 394 of SEQ ID NO:24; amino acids 1 to 415 of SEQ ID NO:26; amino acids 1 to 381 of SEQ ID NO:28 amino acids 1 to 381 of SEQ ID NO:28; amino acids 1 to 376 of SEQ ID NO:30; amino acids 1 to 368 of SEQ ID NO:32; amino acids 1 to 372 of SEQ ID NO:34; amino acids 1 to 374 of SEQ ID NO:36; or amino acids 1 to 372 of SEQ ID NO:38.

3. A transgenic plant transformed with an expression cassette comprising an isolated polynucleotide encoding a full-length polypeptide having calcium dependent protein kinase activity, wherein the polypeptide comprises:
a) a protein kinase domain selected from the group consisting of a domain having a sequence comprising amino acids 59 to 317 of SEQ ID NO:40; amino acids 111 to 369 of SEQ ID NO:42; amino acids 126 to 386 of SEQ ID NO:44; amino acids 79 to 337 of SEQ ID NO:46; amino acids 80 to 338 of SEQ ID NO:48; amino acids 125 to 287 of SEQ ID NO:50; amino acids 129 to 391 of SEQ ID NO:52; amino acids 111 to 371 of SEQ ID NO:54; amino acids 61 to 319 of SEQ ID NO:56; amino acids 86 to 344 of SEQ ID NO:58; amino acids 79 to 337 of SEQ ID NO:60; amino acids 78 to 336 of SEQ ID NO:62; amino acids 90 to 348 of SEQ ID NO:64; amino acids 56 to 314 of SEQ ID NO:66; amino acids 67 to 325 of SEQ ID NO:68; amino acids 81 to 339 of SEQ ID NO:70; and amino acids 83 to 341 of SEQ ID NO:72; and
b) at least one EF hand domain having a sequence selected from the group consisting of amino acids 364 to 392 of SEQ ID NO:40; amino acids 416 to 444 of SEQ ID NO:42; amino acids 433 to 461 of SEQ ID NO:44; amino acids 384 to 412 of SEQ ID NO:46; amino acids 385 to 413 of SEQ ID NO:48; amino acids 433 to 461 of SEQ ID NO:50; amino acids 436 to 463 of SEQ ID NO:52; amino acids 418 to 446 of SEQ ID NO:54; amino acids 366 to 394 of SEQ ID NO:56; amino acids 391 to 419 of SEQ ID NO:58; amino acids 384 to 412 of SEQ ID NO:60; amino acids 418 to 446 of SEQ ID NO:62; amino acids 395 to 423 of SEQ ID NO:64; amino acids 372 to 400 of SEQ ID NO:68; amino acids 388 to 416 of SEQ ID NO:72; amino acids 452 to 480 of SEQ ID NO:42; amino acids 470 to 498 of SEQ ID NO:44; amino acids 420 to 448 of SEQ ID NO:46; amino acids 421 to 449 of SEQ ID NO:48; amino acids 470 to 498 of SEQ ID NO:50; amino acids 472 to 500 of SEQ ID NO:52; amino acids 455 to 483 of SEQ ID NO:54; amino acids 402 to 430 of SEQ ID NO:56; amino acids 427 to 455 of SEQ ID NO:58; amino acids 420 to 448 of SEQ ID NO:60; amino acids 454 to 482 of SEQ ID NO:62; amino acids 444 to 472 of SEQ ID NO:68; amino acids 460 to 488 of SEQ ID NO:72; amino acids 488 to 516 of SEQ ID NO:42; amino acids 512 to 540 of SEQ ID NO:44; amino acids 456 to 484 of SEQ ID NO:46; amino acids 457 to 485 of SEQ ID NO:48; amino acids 510 to 535 of SEQ ID NO:50; amino acids 512 to 537 of SEQ ID NO:52; amino acids 497 to 525 of SEQ ID NO:54; amino acids 438 to 466 of SEQ ID NO:56; amino acids 463 to 491 of SEQ ID NO:58; amino acids 456 to 484 of SEQ ID NO:60; amino acids 522 to 550 of SEQ ID NO:42; amino acids 546 to 570 of SEQ ID NO:44; amino acids 491 to 519 of SEQ ID NO:46; amino acids 492 to 520 of SEQ ID NO:48; amino acids 542 to 570 of SEQ ID NO:50; amino acids 542 to 570 of SEQ ID NO:52; amino acids 531 to 555 of SEQ ID NO:54; amino acids 474 to 502 of SEQ ID NO:56; amino acids 497 to 525 of SEQ ID NO:58; and amino acid 490 to 518 of SEQ ID NO:60; amino acids 489 to 517 of SEQ ID NO:62; amino acids 501 to 529 of SEQ ID NO:64; amino acids 470 to 498 of SEQ ID NO:66; amino acids 479 to 507 of SEQ ID NO:68; amino acids 492 to 520 of SEQ ID NO:70; and amino acids 495 to 523 of SEQ ID NO:72.

4. The transgenic plant of claim 3, wherein the polypeptide has a sequence comprising amino acids 1 to 418 of SEQ ID NO:40; amino acids 1 to 575 of SEQ ID NO:42; amino acids 1 to 590 of SEQ ID NO:44; amino acids 1 to 532 of SEQ ID NO:46; amino acids 1 to 528 of SEQ ID NO:48; amino acids 1 to 578 of SEQ ID NO:50; amino acids 1 to 580 of SEQ ID NO:52; amino acids 1 to 574 of SEQ ID NO:54; amino acids 1 to 543 of SEQ ID NO:56; amino acids 1 to 549 of SEQ ID NO:58; amino acids 1 to 544 of SEQ ID NO:60; amino acids 1 to 534 of SEQ ID NO:62; amino acids 1 to 549 of SEQ ID NO:64; amino acids 1 to 532 of SEQ ID NO:66; amino acids 1 to 525 of SEQ ID NO:68; amino acids 1 to 548 of SEQ ID NO:70; or amino acids 1 to 531 of SEQ ID NO:72.

5. A transgenic plant transformed with an expression cassette comprising an isolated polynucleotide encoding a full-length polypeptide having cyclin dependent protein kinase activity, wherein the polypeptide comprises:
a) a cyclin N terminal domain having a sequence selected from the group consisting of amino acids 59 to 190 of SEQ ID NO:74; amino acids 63 to 197 of SEQ ID NO:76; amino acids 73 to 222 of SEQ ID NO:78; and amino acids 54 to 186 of SEQ ID NO:80, and
b) a cyclin C terminal domain having a sequence selected from the group consisting of amino acids 192 to 252 of SEQ ID NO:74; amino acids 199 to 259 of SEQ ID NO:76; amino acids 224 to 284 of SEQ ID NO:78; and amino acids 188 to 248 of SEQ ID NO:80.

6. The transgenic plant of claim 5, wherein the polypeptide has a sequence comprising amino acids 1 to 355 of SEQ ID NO:74; amino acids 1 to 360 of SEQ ID NO:76; amino acids 1 to 399 of SEQ ID NO:78; or amino acids 1 to 345 of SEQ ID NO:80.

7. A transgenic plant transformed with an expression cassette comprising an isolated polynucleotide encoding a full-length polypeptide having serine/threonine-specific protein kinase activity, wherein the polypeptide comprises a domain selected from the group consisting of a domain having a sequence comprising amino acids 15 to 271 of SEQ ID NO:82; amino acids 4 to 260 of SEQ ID NO:84; amino acids 4 to 260 of SEQ ID NO:86; amino acids 18 to 274 of SEQ ID NO:88; amino acids 23 to 279 of SEQ ID NO:90; amino acids 5 to 261 of SEQ ID NO:92; amino acids 23 to 279 of SEQ ID NO:94; amino acids 4 to 260 of SEQ ID NO:96; amino acids 12 to 268 of SEQ ID NO:98; and amino acids 4 to 260 of SEQ ID NO:100.

8. The transgenic plant of claim 7, wherein the polypeptide has a sequence comprising amino acids 1 to 348 of SEQ ID NO:82; amino acids 1 to 364 of SEQ ID NO:84; amino acids 1 to 354 of SEQ ID NO:86; amino acids 1 to 359 of SEQ ID NO:88; amino acids 1 to 360 of SEQ ID NO:90; amino acids 1 to 336 of SEQ ID NO:92; amino acids 1 to 362 of SEQ ID NO:94; amino acids 1 to 370 of SEQ ID NO:96; amino acids 1 to 350 of SEQ ID NO:98; or amino acids 1 to 361 of SEQ ID NO:100.

9. An isolated polynucleotide having a sequence selected from the group consisting of the polynucleotide sequences set forth in Table 1.

10. An isolated polypeptide having a sequence selected from the group consisting of the polypeptide sequences set forth in Table 1.

11. A method of producing a transgenic plant comprising at least one polynucleotide listed in Table 1, wherein expression of the polynucleotide in the plant results in the plant's increased growth and/or yield under normal or water-limited conditions and/or increased tolerance to an environmental stress as compared to a wild type variety of the plant comprising the steps of:
(a) introducing into a plant cell an expression vector comprising at least one polynucleotide listed in Table 1, and
(b) generating from the plant cell a transgenic plant that expresses the polynucleotide,
wherein expression of the polynucleotide in the transgenic plant results in the plant having increased growth or yield under normal or water-limited conditions or increased tolerance to environmental stress, as compared to a wild type variety of the plant.

12. A method of increasing a plant's growth or yield under normal or water-limited conditions or increasing a plant's tolerance to an environmental stress comprising the steps of
(a) introducing into a plant cell an expression vector comprising at least one polynucleotide listed in Table 1, and
(b) generating from the plant cell a transgenic plant that expresses the polynucleotide,
wherein expression of the polynucleotide in the transgenic plant results in the plant having increased growth or yield under normal or water-limited conditions or increased tolerance to environmental stress, as compared to a wild type variety of the plant.
